United States Patent Application Publication US 2007/0054278 A1 - sequence listing, part 20

SEQ ID NO: 93628 - DNA, 15254 bp, Homo sapiens
accttctgtcagcctccacacgttcagctctcagaagcttcccgaaccctgtcctttgggccttttatggagaactccattggctgtccatgactgaagcatggacaactgtgataatgtgattgggcaaaaagggtctgatctaagcccagcaaggccagtccagattctttgggcctttgtgcagcattcctttctccagggtatggggcaaggacccactctggaatgaggatcctacaacccacaatcagattagagtcctgccttgggcagctgaaaagaggacaggagaaggtcaaagagaggaaaggctgttttttgaggcctgaggcgccccaacatgacaacgaaagactgtaaccatggtcatgtgagttatgagctaggaaccctggacgaaaccaacacatatacaatcatctcccacctcccaacacctttactttcacagcctctgcagcaaactgcggtcactataatcgctcctgtggcacagaggcatacccaggggaatctgcccagggggccactctgtgcccacatgggaacccacatctgcttgtaaagcctcccctccctctgaccagaaacgaggacagtttgttgttccaagcagtgggctcatgtctgttttggctcagaacagggtggggagagcgggccagggacccgcaggagggcttatccttgagattgcgtgggagacacaacaaggggtgggggcccgcaggcggggcggggcgaagcaggtgatatccagcccagagccccagcctctccccacagtctcaccatggcctgcaccgtggtgctcatcaccggctgttcctcaggtattggcctgcacttggcaatacatctggctttggacccatcccagagcttcaaaggtatagataggtagggacagggagggagagaagggaaaagcccttggaggccagaagagaagtcagatcttcctcctctcccaaaacctccagtgtatgccacgttgagggacctgaaaacacagggccggctgtgggaggcggcccgggccctggcatgccctcagggatccctggagaggttgcagctggatgtaaggaactcaagctccctggccgctgcccgggaacgcgtgaccgagggccgtgtggatgtgctgggtgagcctcctggaagcatatgggctcctaggagccttctccgccctgcgttgaaaccaacatgtccccaggcccctggagcatgaggggacaggccgtgctgagggtgatgctgaggcgggctggttgggcctctgtccccgcagtgtgtaacacaggcctgggcctgctggggccgctgggggaggacgccgtggcctctgtactggatgtgaatgtagtaggtactgtgcgggtgctgcaggacttcctgccagacatgaagcggccgggttygggacgcgtgttggtgactkggagcatgggaggattgatgggtgagtggcagggaccgggccccggagctccagattctttgtgtgcagagctgagccttgaaggcaggctccttagggggtggggtgcaatcagcttggaggggcactgcctgccgggggatgaccccctggccgctgcgcctcaggaacctcatcttcccacccaagggctgcctttcaatgacgtttattgcgccagcaagttcgcgctcgaaggcttatgcgagagtctggcggttctgctgctgccctttggggtccagtgagtcaacacccccgtctcctcaaccctcttaactctgacctagagatgccgagcaccctgtcctgcggaagccgctctggtctctgcccggcttacatttgctgcgtgccaggcacttaggctggagcattggcacgcattgtgccacttgctgacctggctgctgaagtgttggtattgttatggggaagctccagccargagaggttaggtgactggcccaaggtcatgcagcggccggggatcccgccaggttcgaattctgacaccagggctacctggcagcctcagatgggtttgggagggctgtcgagcaataacccgctattcaaatgttctggttatccccagcgctctttccaccttcgggacgcagcggtgctgttctgggtcgtggccagggccggggtcggggccggtgctggggcaggagatgggacttggcgcctgggtcgcctccgtccctgcccacttgcggctctcgggccagcagcgtgagcctgatcgagtgcggccctgtggacaccgccttcatgcagaaggtgttgggcggtcccgaccaggtgatggaccgcacgaacacccggaccttccgcctcttgcactaatacctccaccacagcaaggagatctaccgcgaggaggcgcagcmccctgaggaggtggtgaaggtgagcggggggcgggactccgggagcgggggcggtgcgtcgtcctgcgcgcagccggggccagagctcctctcccgccgccgcaggtcttcctcaccgctatgcgcgccccgaagccgaccctgcgctacttcacaaccaggcgcttcctgcaccagctgctgatgcgcctggacgacccctttggcttcgactacgccgccgccatgcaccgggacgtgttcgccgacgatcccgcagaggccgaggctggggccggggctggggccgaggccgggggcggggccggtgggatgggagaccctgagctcagcgatcctctggccgccccgcaagaaaggctccgtcagccactgtctcccgcgccctcctttgtctcctgggcctgtgcggtccctggggatgggacggcggtgacggctgtggatggctaattaagacagatcacgttagcccgttatatctgcgcggctaggcgcgatggctgtcgcctataatcccagagctttggaaggccgaggcaggaggatcgctccaggccaggagttccagaccagcctgagcaacatagtgagacaccccatctctaaaataaaaaaattagcacagtggcaccattccttgagctcaggagttggaggctgcagtgggcatgatcgagctactgctctccagcttgggcgatagagtgagacactgtcaattaattaatctaatcaaccaaccaacccaacaacccagaaaccaaggtccagaaagaagccagcccaggatcatgcctcaagtccacagtaaagcccagacacagtcactggatacccaaggggcatctgcaggacgagttaggtgggacttgggttggggtagagtcaggttgtgacctgcactccattagccatgagacctcaggcaagttccttgctttctctgagtgctttcctttcctttcccttttcttttcttttttgtttttcttttgttttgagatggagtttcactcttgttgcccagcctggagtgcaatagcgcggtctcagttcaccacaacctctgcctcccgggttcaagtgtagctaggattgcaggcatgtgccaccacgcccagctaattttgtgtttttagtagagacgaggtttctccatgttggtcagactggtcttggactcccgacctcaggtgatccgcccgccctggcctctcagagtgctgggattacaggcatgacccaccccatccggccctctgagtctttcttatctgtaaaatgggtataataatacctatctaatcggttttagtaatggtggagataatgcctgaaagtgctagtatagaggtttaatagccagcaaggactgttattagaatgaatagtaatatgactactgtcacattttgcaaatgtgtaaagaagaaagagggctaagtgaatcaaagggagacagccccactcaccctgttctgccccagaggactgagcgatccccaccatctggcaagctgcctcaccaggaggtccagctggggctacaggactggctactttgctacaatggcccgtctttcctgagcccagtggagggtcccaggggggcagaagtcattgataggggccagtagggttgtagagccactgtctgaacttctgtggaggtctggtgcaggggaggtgtgaacagataggaggctaggtgaggatgcagcagaggaagggggcaggagtgccccaggagggggcggtaccgaggcagggattcagctgggtctgagagggaggcaaggctgagggggatggccctttggagtgggcagggacatgaccacagaaagcctgggaagtggaaacagacaggagcctgctggagctcttggagctttgtgtggggcactaggggaaggaggcaggcactccaccctgacctgcccctacctctggatgagggtcttctctgcctgttggatgatgtgctgcccctgctcttggaggaagaggcctcccagccaccccctcctgccagtcgccctgmcctgctgacccagacagatctgctatccctacagcatccaggaaggccacagggagggggcccaggtggcatgggtttctgaggcctgggatctgctctcagtcccgctctcgccaaccccctttgcccctctgtgacagtgtgtgtacatatgcgtgcatgtgtgtacctgtgtggtgtggctcacaaggtcacccctgggggtgggataataagaggtaaagtgtgaccccctctcttccgtacattcattttttcaagcttgtgaatattcacattgttaatataatcttctgcagtcccatgacttcgaatagcacttagatgccgatgacccccccaccaaagaaaccccactgtctcccacagactccaggtctgtatctccaactgcctactcaatacaacacgtccacctgatgcaatgaacttaatgtgtctaaaccccaattccacatttccagtcctcctaccggctcctcccccagtcttctctactttactatatgacaactccatttttcccaatactggttttaaaaaccctggagtagtccttgactccagtctctctcacctttcaaccaattcagcagcaaatactgacagctctacctttgctcatcaaagcatatycccaaatcaccctattccagactgcacactgtcatctctcccttcaattacagcagtagcctcctaactagttttcttgattccactcttgcccatcagcagtgaaattaccccagagcagttaaaatgatcttttaggatgggcacagtggctcacgcctgtaataccagcactttgggaggtggaggctggctgatccccttaggttgggagttcaagaccatcctcaccaacagggagaaaccccatctctactaaaaatacaaaaattagccggatgtggtgggacgtgtctgtaatcccaactacttgggaggctgagacaggagaactgcttgaacccgggaggtggaggttgcagtgagccagaatcgtgccacagcactccagcctgggcaagaagcgcgaaactccgtctcaaaataaaataatcttctaaaaatgacagggccaggtggggtggcacttttttataatccgagcactttgggaggctgaggtgggcagatcgcttgacatcaggggtttgagaccagcctggccaacatggtgaaactccgtctctactaaaaatactaaaaattagctgggcgtggtggcgggtgcctgtaatcccagctactcgggaggctgatgcaggagaatcgcctgaaccaggcagatgcaggatgcagtgagccaagattaagacactgcactccaacctaagcaatactttgtctcaaaaataaaaaaaagcctgggaaacaaagtgagaccccgtctctacaaaaaagtcaaaaaattagctgggtatggtggcagtgatggcacacacctgtagtcccggctacttgggaagctttttaatattttttgcagagaccgggtctcactctgttacctggcctggtcttgaactcctgggctccaacaatcccctttcctgggcctcccaaagtgctgggattasaggcatgagccaccgtgcccagcctcaaagcatattttaaaggatagaaataaacagccatatgaagagatacagacagggcggtctggaagggtccagagcaggagcttctatctccatagagttggggttacgtcaccctctgggcacattctgtcagcctccacacgttcagcyctcagaagctcccgaaccctgtcctttgggccttttatggagaactccattggctgtccatgactgaagcatggacaactgtgataatgtgattgggcaaaaagggtctgatctaagcccagcaaggccagtccagattctttgggcctttgtgcagcattcctttctccagggtatggggcaaggacccactctggaatgaggatcctacaacccacaatcagattagagtcctgccttgggcagctgaaaagaggacaggagaaggtcagagagacgaaaggctgttttttgaggcctgaggcaccccaacatgacaacgtaagactgtaaccatggtcatgtgagttatgagctaggaaccctggacgaaaccarcacatatacaatcatctcccacctcccaacgcctttactttcacagcctctgcagcaaactgcggtcactrtaatcgctcctgtggcacagaggcatacccaggggaatctgcccagggggccactctgtgcccacgtgggaacccacacctgcttgtaaagcctcccctccctytgaccagcaaccaggacagtttgttgttccaagcagtgggctcatgtctgttttggctcagaacagggtggggagagcgggccagggacccgcaggaaggcttatccttgagattgcgtgggagacacaacaaggggtgggggcccgcaggcggggcggggcgaagcaggtgatatcaagcccagagccccagcctctccccacagtctcaccatggccygcaccgtggtgctcatcaccggctgttcctcgggcatcggcctgcacttggccgtacgtctggcttcagatccatcccagagcttcaaaggtatagataggcagggacagggagggagagaagggagragcccttggaggcyagaagggaagtcagatcttcctcctctcccaaaacctccagtgtatgccacgttgagggacctgaaaacacagggccggctgtgggaggcggcccgggccctggcatgccctcmgggatccctggagasgttgcagctggacgtaagggactcaaaatccgtggccgctgcccgggaacgcgtgactgagggccgcgtggacgtgctgggtgagcctcctggaagcatatgggctcctaggagccttctccgccctgcgttgaaaccaacatgttcccaggcccmgggagcacgaggggacaggccgtgctgagggtgatgctgaggcgggctggtcgggcctcttgtctccgcagtgtgtaacgcaggcctgggcctgctggggccgctggaggcgctgggggaggacgccgtggcctctgtgctggacgtgaatgtagtagggactgtgcggatgctgcaggccttcctgccagacatgaagaggcgcggttcgggacgcgtgttggtgaccgggagcgtgggaggattgatgggtgagtggtagggagtggcctcggcagctccagattctttgtgtgcggagctgagccttsaaggcaggttccgcggggrgggtggagkggggtgccgtcagcttggaggggcaccgtctgcccggggatgaccccctggccgctgcgcctmaggaacctcgtctccccacctaagggctgcctttcaatgacgtttattgcgccagcaagttcgcgctcgaaggcttatgcgagagtctggcggttctgctgctgccctttggggtccagtgagtcaacacccccgttccccgaaccctcttaactctgacctagagaygccgagcaccctgtcctgcgggagccgctctggggcgatctccctggccctctctgcccggctcacattagctgtgtgccaggcacttgggctgggcgcatggcacgcattgtgccacctgctgacctagctgctgaagtgttggtattgttatggggaagctccagcccagagaggttaggtgactggcccaaggtcacacagcggccagggaccccgctagattcgaatcctgacaccagggctcccttgtagcctcagatggatttgggagggctgctccggcaggaacccgcgtttcaaatgttctggttatcmccagcgccctttccgcctcacttcccagcgcagcggtgctgctcgcggtcgggggccgggacgtggttggggctgggactggggttggggctgggactggggcctggctggcgtccgccccctcccactcgttgctctccggccagcagcttgagcctgatcgagtgcggcccagtgcacaccgccttcatggagaaggtgttgggcagcccagaggaggtgctggaccgcacggacatccacaccttccaccgcttctaccaatacctcgcccacagcaagcaagtctttcgcgaggcggcgcagaaccctgaggaggtggcggaggtgagcgccgggctggactccaggagtgggggcggtgcgtcctccggcgcgcagcggtggccacagctctcctcccgccgccgcaggtcttcctcaccgctttgcgcgccccgaagccgaccctgcgctacttcaccaccgagcgcttcctgcccctgctgcggatgcgcctggacgaccccagcggctccaactacgtcaccgccatgcaccgggaagtgttcggcgacgttccggcaaaggccgaggctggggccgaggctgggggcggggccgggcctggggcagaggacgaggccgggcgcrgtgcggtgggggaccctgagctcggcgatcctccggccgccccgcagtaaaggcttcctcagccgctgtctcccgcgcccttctttgtcccctgggtctgtgtggtccctggggatggggcggyggtagcagctgtgggtggctaattaagatagatcgcgttagccagttttaccagcgcagctaggcgcgatggctgtcgcctgtaatgccagcgctttgggaggcggaggcaggaggatcgctcaagccccggagttggagaccagccagagcaacacagtgagacccccatctctacaaaaataaagaaaatttaaaaatcagcacagtggcaccattccttgagcccaggagttggagggtgcagtgagcatgatggggccactgcactccagcctgggtgacagagtgagaccctgtcaattaatcaaatgaaccaaccaaccgaaaaactcagaaaccaaggtccagaaagaagccagcccaggatcacacctcaagtccatattaaaggccagacacagtctctggatacccaaggggcatctgcaggaggagttaggtgggaattggcttggggtagagtcaggttgtgacttggaccccattagccatgagacctcaggcaagttccttgctttctctcagtctttcttttctttctttctttcttttttttttattttctgagacagagtttcgctcttgttgcctaggctggagtgcaatggggcaatctcggctcaccacaatctccgcttcccagattcaagtgattctcctgcctcagcctcccaagtagctgggataccggctaattttgtatgttcggtagagacggggtttctccatgttggtcaggctggtctcaaactctcgaccttaggtgatccgcccgcctcggcctctcagattgctgggcatacaggcatgagccaccgcgaccggccctctgagtctttcttatctgtaaaatgggtataataatacctatctaatcggttttagtaatggtggagataatgcctgaaagtgctagtatagaggtttaatagccagcaaggactgttattagaatgaatagtaatatgactactgtcacattttgcaaatgtgtaaagaagaaagagggctaagtgaatcaaagggagacagccccactcaccctgttctgccccagaggactgagcgatccccaccatctggcaagctgcctcaccaggaggtccagctggggctacaggactggctactttgctacaatggcctgtctttcctgagcccagtggagggtcccaggggggcagaagtcattgataggggccagtagggttgtagagccactgtctgaacttctgtggaggtctggtgcaggggaggtgtgaacagataggaggctaggtgaggatgcagcagaggaaggggtcaggagtgccccaggagggggcggtaccgaggcagggattcagctgggtctgagagggaggcaaggctgagggggatggccctttggagtgggcagggacatgaccacagaaagcctgggaagtggaaacagacaggagcctgctggagctcttggagctttgtgtggggcactrggggaaggaggcaggcactccaccctgacctgcccctacctcggatgagggtcttctctgcctgttggatgatgtgctgcccctgctcttggaggaagaggcctcccagccaccccctcctgccagtcgccctgacctgctgacccagacagatctgctatccctacagcatccaggaaggccacagggagggggcccaggtggcatgggtttctgaggcctgggatctgctctcagtcccgctctcgccaaccccctttgcccctctgtgacagtgtgtgtacatatgcgtgcatgtgtgtacctgtgtggtgtggctcacaaggtcacccctgggggtgggataataagaggtaaagtgtgaccccctctcttccgtacattcattttttcaagcttgtgaatattcacattgttaatataatcttctgcagtcccatgacttcgaatagcacttagatgccgatgacccccccaccaaagaaaccccactgtctcccacagactccaggtctgtatctccaactgcctactcaatacaacacgtccacctgatgcaatgaacttaatgtgtctaaaccccaattccacatttccagtcctcctaccggctcctcccccagtcttctctactttactgtatgacaactccatttttcccaatactggttttaaaaaccctggagtagtccttgactccagtctctctcacctttcaaccaattcagcagcaaatactgacagctctacctttgctcatcaaagcatattccaaaatcaccctattcgagactgcacactgtcatctttcccttcaattacagcagtagcctcctaactagttttcttgattccactcttgcccatcagcagtaaaattagcacagtgcatttaaaatgatcttttaaaaatgacagggccgggcgtgatggctcatgcctataatcacagcactttgtgaggctgaggcggacgttattgcttgaggtcaggagtttgagaccaacctggccaatatggtgaaaccctgtgtctactaaaaatataaaaattagccaggcatggtggtgggcgcctgtaatcgcagctgctccagaggctgacaaaggagaatctcttgaaccagggaggtggaggctgcagtgagccaagattgggacactgcactccagcctgggcaacagagactttgtctcaaaaaaataaaaattggccgggcgtggtggctcatgcctgtaatcccagcactttgggaggccgaggcgggtggatcacctgaggtcaggagttcaagaccagcctggccaacagggtgaaaccttgtctctactaaaaacccaaaaaattagccaggcgtggtggcacgtgcctgtaatcccagctactcaggcggctgaggcaggggaattgcttgaaccccggaggcgtacgctgcagtgagtggagattgcgccattgtactctagcctgggcaacaagagtgaaactccatctcaaaataataataataaaattaaaaaaaatttaaaataaaaaagggagcctgggcaacaaagtgagaccccgtctctacgaaaaaacaaaaaaaatagttgggtgtggttgcacacatctgtagtcccagcttcttgggaggctgacatgggaagactgtttgagcccaggaggttgaggccacagtaagctgtgggcacaccactgcattccagcctgggcaagagagggagaccctgtctcataaaagaaagaaagaggccaggtgtggtggctacgcctgtaatcccaacactttgggagcccaaggccggtgaatcacttgagatcaggagttcgagaccagcctggccaacatggtaaaaccccgtctctactaaaaatacaaaaattagctgggcgtggtagtttgtgcctgtaatcccagctactggggaggctgaggcaggagaatcgcttgaacccgggagacgaaggttgcagtgagctgagatttctccactgcactccagcctgggtaaagagtgagactcggccgggtgcggtggctcatgtctttaatcccagcactttgggaggccgaggcgggtggatcacctgaggtcaggagttcaagaccagcctggccaacctggtgaaagcctgtctctactaaaaatagaaaaattagctgggcgtggtggtgggtgcctgtaatcccagctactcaggaggctgaagcaggagaatcacttgaacctgggaggcagaggttgcagtgagccgagatcatgccgttgcactccaacctgggtgacagtgagactctgtcttaaaacaaaacaaaagaagcaaagtttattttgctcagagcttcacagttttaggggctggaaagtgcaagaacctcatgcagtatctggcaaagggctgtcccaggatggaagggcagaaggtggaagcaaatgagagacacgaaattgggccaaatgtcgtccatccatcaggagccactcccatgataacagtatttatctattcaagagggcagagccctcatgatctaattatcttttttttttttctcctgcctcggcctcttgagaagctgggattttaggcgcatgccaccacaccccgctaatttttgtacttttagtagagacggggtttcaccacgttggttgggctggtcgcaaactcctgatctcaggtgatccacctgagatccaccactttggcttcccaaagtgctgagattacaggagtgagccacctcgcccagctgacctaattacctcttaaaggccccaccctgcccagtgcagtggctcaggcctgtaatcccaacactttgggaggctgaagtgggaggactgcttgagttcaggagttggaaaccagcccaggcaacacagcaagatcctgtctgtatgaaaaaaaaaattttttttttaattagccaggtgtggtggcacacatctgtagttccagctgctcaggaggccaaggcagaggactgcttgagcccaggcagttgaggctgctgtgagccatgatcaacccactgcactccagcctgggggacaagagtgagaccctgtctcaaagagaaaaaaagtcccatctcttaagacagtagcaattgaattttttatttcaacatgagttgtggcagggacattcgaaccatagcaccaaggttctccccaaagctctccaagaccttctttgatctggttcctgccccctttctgatctcatctcccaccaatctccatctacatcacccagttcagccctcctgcctcagggcctttgtatttggccccctctgggtcacattccctgatctctgattctatgtcttccttcagatttttgctgttttcctgaaccaccttatctaaaatagcctctcagcttctccactatagctcccttactctgctttacttttgttcttatcctttatcaccagtagatatattatggatttgggttttttaatttaatttttattttttttggagacggagtctctctgtcacccaggctggagtgcagtggcgtgatctcggctcattgcaatctctgcctcccaggttcaagcgattctcctgcctcagcctcctgagtagctggaatcacaagtaccgccaccacacccagctaattttttgtatttttagtagagacggggtttcactatgttggccaggctagtcttgaactcctgacctcaggtgatctgcctgcctcagcttcccaaagtgctgggattacaggcgtgagccaccgcgcctggccatgtattatagatttatttatggtggcatgattcctgtctgcaaccccaagacacacagtactctataccccaggatggcagggacattgttttgttcactggtccatccctgtgggaggcactaaaatacacatttactcaataaaaatgactctgtatgtggtgtgtcagactgtgtgtccagatgtcttgggacattctctggcagcctttgctgtttgtgtcttcaaatcagaccctatctttaaatctaacatgtctcctgtgagaagcctggtcccttaatacctttgtggctctacaactcttccctccttgactgtatctcttcctccaggtctttgctgttttcctgaatcaccttatctaaaatagcatctccttttctccatcataagcccaggttttgtggggctgggggcttatttgcttttggagaccgtcttcaagaatacaaaagataaacacaaaattacatataaaagtgagttttgtttttttttttaagtttcggaaaccacggcacattactggaatcttggagactggcttctctcccttttgatctccatgcacaacttacctgagatgtattctaatagcaacctggcttcccctccacactcagcctttcaagcgcccattagcttcgcagtaaatctcccacactaggtatccagcctttgcctttttcttttttctttttttttttccagagggagtttcgctttttttttttttttttttttgagacggagtctcactctgtcacccaggctggagtgtagtggtgcgatctcggctcactgcaagctcttcctcccgggttcacgccattctcctgcctcagcctcccgagtagctgggactacaggcgtctgccaccatgcccggctaatttttttttgtatttttagtagagacggggtttcaccgtgttagc

SEQ ID NO: 93629 - DNA, 18947 bp, Homo sapiens
gcacccatcttcctgtcgtccaccttcaactacaatggctctaccctggcagctgtgcatgccacccctcggggcttgcgctcaggggaccgagctacctggatggccctctaccataacatctcaggggttggtcttttccttcaccccgtggggctggagctactactggaccacagggccctggaccctgcccactggactgtccagcaggtcttctaccttgggcactactatgcagacttgggccagttggaacgggagtttaagtctggccggttggaagtggttagagtccctctacctccaccaaatggagcttcatccctgaggtctcggaactctccaggtcctcttccccctcttcagttctcgccccagggttcccagtacagtgtgcaaggaaacctggtggtatcctccctctggtcatttacctttggccatggggtgttcagcggcctgaggatttttgatgttcggttccagggtgagcgaatagcctatgaagtcagtgtccaggagtgtgtatctatctatggtgccgattcacccaagacgatgctgactcgctatttggatagcagctttggactcggccgtaacagccgaggcttggtgcggggagtggactgcccctatcaagccacgatggtggacatccatatattagtgggcaaaggggcagtccagctgcttccaggggctgtgtgtgtatttgaggaagcccagggactgccccttcgaaggcaccacaattaccttcaaaatcatttctatggtggtttggccagctcagcccttgtggtcaggtctgtgtcatctgtgggcaactatgactacatttgggactttgtgttgtacccaaatggggcacttgaagggcgggtccatgccacgggttatatcaacacagctttcctgaaagggggagaggagggcctcctctttgggaaccgtgtgggggaaagagtgctgggaacggtgcacacacatgccttccacttcaagctggacctggatgtggcaggtgagtgctgaggggatgaggatggagacttgggggcggggtcaggtggggtggagggaagggaagggaatctcccaggtcaagctgaaataacaagtggcaagagcagggtgttccaacaccacagctctagtggcaacagggcagggactgtttgagcatattcagtgcagtgagtctggtactgggctactgggtatctggtaaaaggtgaaaagagttcccccgcccagcccctctgacttgctatgattgtgaaactagtttaaatgtaatggctgggcatgattgccttagcctcaagtgacactgggtgggtgaactggcccaatggggctggagttggagcactttgcttcttcctaattctgagggtcagtaggggtggggagggcagggtcctgagccgaggtcggaagaagtctgtccagagtcttcagggtgggggtcgacctggggcttaggaaggagagggtagcaaagctggggttgctccccaggatagggccactcctcatcgggagggccatcccattcctgtcatcacagttgactcatggcaggcacacagcttgctgcaagtatggaaagagatttctcaagcacaaagggctcaaagcacacagaggacttgctgttcctgacagactttgtcaaggacagaaaggaacttacagactcacacactgatccacaaagaaaattagaaactcaccagaccctctccattttaagggaaactaaggagggtggcgggagatgggacaggaaatgactgcccaagtataatgcaacataaactagtatttcttgtgaaatgttttcttatcctcaagtctaaagacatggcacgtgcgtgcctgcgtgtgtctctgtgcatgcacttgcacttgtgttcgcagtggtgtggagggtaggaaggactaatagcatgattgaaatgatcatattaactagattactctttgacatacttggattttgacttgtcttctgattggaagtttttcttcagcatctttggcattaaagaggcttgttttgggaagtaacatttattggacccctagcgtgtgcagcatgggctgctgctgtgggccagagaggctgtgtcaggcaccagctcacaggatggctgcagaggcaccagcttcagtgcagtgcctcccgtgccaggtaccttcatataggtctcgttgaacttacagtccagacctgcagaaagtgtatgaccaagtgctgagttaggcagtgcaggttatggatgctgtagaattccaaggaactcccagacaaaggtatgaatgtgcttgcttctgaaaaacactgacagtacttcccaccttgctgagatcaaaagtgaagtctcagagctgggaggagtatgcaggggaccatgggaagggattgggttttctttttttgaggcagtgtctcactgtcacccaggctggagtgcagcggtgcaatcacaggttactgcagccctgacctcctgggctcaagcaatcctcctgcctcagcctccttagtagctgggatgacaggcatacactaccacgcccagctttttttttttttttgaagacagagtctcactctgttgcccaggctggagcacggtggtgcaatctcagttcaccgcaacctccacctcccaggttcaagcgattcttgtgtctcggcctccagagtagcacaccaccacacctggctaatttttttaaattatttatttatttaagtagagatggggtttcaccatgttggccaggctcatcttgaactcccggtctcaagtgatccactcgcctcggcttcccaaagtgctgtgagctaccatgcccggccttttttttttttttttttttttttttaagaggcagtgtttcattccgttaccccagctggtgtccagcacctgggttcaagggatctgcatcaccctgccaccagcctcctgagttgcaagctgccacacccggctcaggagtcagtttttcagctagcttctccaagacaaatatcattatccctttcatagttaaaagaatgtcactagtcagctgcaagtgcttttctgtttattgggcacagccatagaacagctttaattatgcccagtgtagggattcagaaagtgaatcagagaagcaaattggtccagggactgtttggtagtccagtgctaatagaactttctgtagtgatagaaatattccgtatttgagctgtggctctaaacaatagtcactagccatgtgtggcaactgggcacttcaagtgtggctagtgtgacagaggaactgaatatatatatatatatatatacatatatatatatatatatattttagacagagtcttgctctgttgcccaggctagagtgcagtggtgtgacctcagctcattgcagccacaacctactgggctcaagcaatcctcctaccccagcttcccaagtaactgggaccacaggcatgtaccaccatgcctggctgatttttttattgtttgtagagtcagggtttcaccacgttgcacaggctggtctcaaactcctgggctcacatgatccacccgcctcagcctcccaaagtgctgggattgcaggtgtgagccacctcagctggccctaagttttaattttcatagccacgtgtggctagtggttaccctatcggatagggcaagttggaagaagataggagcttgctcttgcccagacctcctggctcccagcacagtgtgctctgatgctctctctgccttttgtcacaccagtgcagtggacatcatggggaagacagggacctggcccagagaccttacctggtgtggaactcatctcctttccctccccctggcagggctgaaaaactgggtggtagctgaagacgtggtgtttaaacctgtggctgccccctggaacccggagcactggctacagcgcccacagctgactcggcaggtcctgggaaaggaggacctgacagctttttccttgggaagccccctaccccgctacctctacctggctagcaaccagactaatgcgtggggtcaccagcgcgggtaccgaatccagatccacagcccccttggcatacacatacccctggagagtgacatggagagggccctcagctgggggaggtgaggagggccctggcctgggtggaaggaaaggacagcccctcccctgccccagtccttggagacaaactcccttcccacggctaccattcatccctgtacctcccctcaaacccaagttagatacacggtgggaaatggtctcacacagaatcggatctaagggactcctgggccagtaaaggcacttgacatttcccaaaaccaccttcttatgattcctggccagataccagcttgtggtgacccagagaaaggaggaggagtcacagagcagtagcatctatcaccagaatgacatctggacacccacagttacctttgctgacttcatcaacaatgaaaccctcttaggagaggttggttgccctagggacataggaaagggacacctgtgggcatggcatcttggctgcccagcctctggccaaaggttagagggaatggctgatttccagttcgcagattcagaggccatggagttttctgatgaccaacacaggtcatccctcctggggtgagattagctctgggacactggctcccccctctccccgcacagctgcttacatggattgctccacgtgttgtatgggcatgaggctggggagagtggaagccaggctgagactggaggctgggattgtgactgaagggtggttctttgggtcacgcttccatagtcctccagctcctccttcttcttgcaggatctggtggcttgggtcacagccagcttcctgcacattccccatgccgaggacatcccaaacacagtgactctggggaacagagttggcttcttgctccgaccctataacttctttgatgaggacccctccatcttctcccctggcagtgtctactttgagaagggccaggatgctgggctctgcagcatcaatcctgtggcctgcctccccgacctggcagcctgtgtcccggacttaccccctttctcttaccacggcttctagtcctgagggtgtggcgggcggcgtggttaggcacatgtacttttccctgtttctactttctattctccgtgtttttatcacacctgctccccagattcccaccccctcaatgttcctctcacacgaaacccccatcagtccctttggttaattcttacttcctgttcatctctaaagtgttaaattataaaaatgatttttaaatattcaaagaaaaatatcacaaatcctactactcagaaataggtggtcacattacatcagacatctctttatgcatgtgcattcaaaaggaagagtagatagaattttgtaaaacagatgttgtatgtaatttataataaaaagtattagaggaattttacttgaatttattgtttgacctgttaagtatctagagtcctctggagaatactaaggagtctggccagggaaattagcgctgggggccagagggcaagggggatagacctggccaaggaatgtcatttggaaagctaaaggggcagggggtgggggtctttggaaggaaaacgatagtttgaagttacaggaaaatatctggccctgactaagtgggggactggggaagaagctgggctgaggtcaggagaggctgctctgcacagatcctgctccttcccagtgctgcattatcttgaaattttccttccccttccccctagccccaactctccccaactccaaccctgacccagaaagtagagtgatttggaggctggaagacaaaaccatgtaaggtctgtggaaatcacagctgttcagacccgcctccaaccccggccaccccgcccccttgccctagccttcctgtgtccttcccacccttagtcccaggcatctgactaccgggaacctcagccagagtccgggagccccccaccccgtccaggagccaacagagcccccgtcttgctggcgtgagaatacattgctctcctttggttgaatcagctgtccctcttcgtgggaaaatgaaccagaagacaatcctcgtgctcctcattctggccgtcatcaccatctttgccttggtttgtgtcctgctggtgggcaggggtggagatgggggtgaacccagccagcttccccattgcccctctgtatctcccagtgcccagccttggacacaccctggccagagccagctgtttgcagacctgagccgagaggagctgacggctgtgatgcgctttctgacccagcrgctggggccagggctggtggatgcagcccaggcccrgccctcggacaactgtgtcttctcagtggagttgcagctgcctcccaaggctgcagccctggctcacttggacagggggagccccccacctgcccgggaggcactggccatcgtcttctttggcaggcaaccccagcccaacgtgagtgagctggtggtggggccactgcctcacccctcctacatgcgggacgtgactgtggagcgtcatggaggccccctgccctatcaccgacgccccatgttgttccaagagtacctggacatagaccagatgatcttcgacagagagctgccccaggcttctgggcttctccaycactgttgcttctacaagcrccggggacggaacctggtgacaatgaccacggctccccgtggtctgcaatcaggggaccgggccacctrgtttggcctctactacaacatctcgggcgctgggttcttcctgcaccacgtgggcttggagctgctagtgaaccacaaggcccttgaccctgcccgctggactatccagaaggtgttctatcaaggccgctactacgacagcctggcccagctggaggcccagtttgaggccggcctggtgaatgtggtgctgatcccagacaatggcacaggtgggtcctggtccctgaagtcccctgtgcccccgggtccagctccccctctrcagttcyatccccaaggcccccgcttcagtgtccagggaagtcragtggcctcctcactgtggactttctcctttggcctcggagcattcagtggcccaaggatctttgacgttcgcttccaaggagaaagactagtttatgagataagcctccaagaggccttggccatctatggtggaaattccccagcagcaatgacracccgctatgtggatggaggctttggcatgggcaagtacaccacgcccctgacccgtggggtggactgccccwacttggccacctacgtggactggcacttccttttggagtcccaggcccccaagacaatacrtgatgccttttgtgtgtttgaacagaaccagggcctccccctgyggcgacaccactcagatctctactcgcactactttgggggtcttgcggaaacggtgctggtcgtcagatctatgtccaccttgctcaactatgactatgtgtgggatacggtcttccaccccagtggggccatagaaatacgattctatgccacgggctacatcagctcggcattcctctttggtgctactgggaagtacgggaaccaagtgtcagagcacaccctgggcacggtccacacccacagcgcccacttcaaggtggatctggatgtagcaggtaagacattttggtggggagaaggcttctggaagaagggctgaaaagttgtttccattagctttgggttttatgtagattatcccagaaaggaagacgtggatttttgtacttccccttttgctggatgggagagagttggctgctgagttttatttggatcttagctcactggctgggtgcaaagctgcagccttcctctacgtgacctcatccaaagatcttgggaaatggccgagctcagggaggaggcaggatttgggctaacagtgtccccattgccctcttctctcccttgtacttatatgggctctgctgctgggagcagccttctgtttgtcagctcagttctgtgtctggcctgtggtggtggtgttttggaggatctctttgcattctaccacgtccctggcatgtgcaggtcagtcattccaggttgtacatttcctttggagatggaccctcctccctgattttccttctttctctgggcacaattcacctaagtgtgaggggtcacatggatcccgtggagcattctggatagatcctggagtctggtcacagagagagccaaggctacatgatggcttggagtcttcatctttgtcttttcactgtctttccccacattgagtcagtcaccaggtgtttttttttggttttgttttattttgttttgtttctgttttgcacctgcagtatctcggcaggtcagactgtcatgccgtgcaggtgccagccctctctctgctgtttttgctcttgttgctctcagagccaagagccactctgcacccagagggcctcccatccacaccagcctgccctttactcagctctcactttcgtcatcacctgtgggatcctgtctgcagaaccccctcaaaactctttccttcacggtgcagctccaccctgccttgctgtgctctgcacagctacacccaaattctccatgtccctggacacgcacttcacatgttacagtcaggcatcctcctgtttgcttatgctttgtctctgcttagaatgtccttccatatcatcttttctggtaatgtcctttaaggccaggctgaaaagttgcccggaagggcccccttttcctgcctgcaactgtattcctgtgatccggaagttgcctaggccatgctcctctcacaggacaggccagtcagtggtttgtctgtctgcgtggaaagcaagagggtaaggatgatcattcatctctatccccagggacgagtacagtcctctctgctaatgaatgttgaaagaatgaatgagtgaaatggaatgaactccctgatgaagtattttaatttacaggtcaacagctttggctaaaggattggaggtatcctggggagagggaagagaaggaggggcacactcagttctgggctgctctttggcccccactctgaagccagatgggggcagagtccagaggggccagggcagttgcctgacaggccctcccctatcccaccctgagcaggactggagaactgggtctgggccgaggatatggtctttgtccccatggctgtgccctggagccctgagcaccarctgcagaggctgcaggtgacccggaagctgctggagatggaggagcaggccgccttcctcgtgggaagcgccacccctcgctacctgtacctggccagcaaccacagcaacaagtggggtcacccccggggctaccgcatccagatgctcagctttgctggagagccgctgccccaaaacagctccatggcgagaggcttcagctgggagaggtgagtggcgggcagtcagagaggaggggggcagtgagagtgggaaaggagtgttggcggacactcagctcacactgtaggtgaggggagagctctctcaggaaggcttttcttttccttttttttttttttttttgagatggagttttgctctgttgcccaggccggagtgcagtggagcaatctcactgcatcctccgcctcccagtttcaagcgattctcctgcctcagcctccccagtagctgggattacaggtgcacgccaccacacatggctaatttttgtatttttagtagagatagggtttcaccatgttggccaggctggtctcgaactcctgacctcatgatccaccctccttggtctcccaaagtgctgtgattacaggcatgagccacaatgcctggccaaaggtttttctagttatccaaagaaaccatgatgggcacattttccccttggaggctaaagcccaggagtgagaactctcttctgttttggatgggagaggggttgtactgttaaatggctggggataaacaggaggacttgaccccccttagggtgacgtcggggattctgtagcgccgagtcagttgtgtgactgcaattggggaagctgagctctgagcactcagttccctttcatcataatcaggcagcaggatggggtyaatggccatggaggcctgaccagtgcctccctaggtaccagctggctgtgacccagcggaaggaggaggagcccagtagcagcagcgttttcaatcagaatgacccttgggcccccactgtggatttcagtgacttcatcaacaatgagaccattgctggaaaggtcagctggccggggtagagggtacaggatgagccttgctttctcttgggagggtccctgaaaaccacctgcacttctcaggggtggtgctgattcctgccttctgcacttcagtatatctgatcattatcctttgagggaaccttcctgagctgggtgtccatatgcagacactgagtgaggccctgggcctgtccttgagatcttagagccctcttagttccagtttcatggactgagtcctttccaggctccaggactcaggagggatggaagttaccaggsaaaatgacatctcctgtatctgaagcttctcccattcctgacttgatgaatttcacaatgttggcctggttctgcttcccaagcgctggttctttttcctccacccttctttcctcagttgtggggaactcttggagagttaggggaagaggagctgaagtagcctgtgggtgtcaccctctgggggtagataggcaatgggcgatatgatgggaaatgtcagagatggaggctgcaagccagggacagggaagcaggtgttcctaatatgaaatggactacttatgctttgactcctacccagcaggaaaaaatgtttaaagactcatgatccttgggctggtgagctgaatccctaccagggcatgtcctcagcaaagccagacctcgtgatcctctttcttctcccctgctaggatttggtggcctgggtgacagctggttttctgcatatcccacatgcagaggacattcctaacacrgtgactgtggggaacrgcgtgggcttcttcctccgaccctayaacttctttgacgaagacccctccttctactctgccgactccatctacttccgaggggaccaggatgctggggcctgcgaggtcaaccccctagcttgcctgccccaggctgctgcctgtgcccccgacctccctgccttctcccacgggggcttctctcacaactaggcggtcctgggatggggcatgtggccaagggctccagggccagggtgtgagggatggggagcagctgggcactgggccggcagcctggttccctcttycctgtgccaggactctctttcttccactaccctccctcgcatccgcctctgagccaggagcctcctgaccctgtgatgcctgacacaggggacactgaaccttgttgatgccagctgtactgagttctcatccacagaggccaggcatggcccagcctggagccgtggccgagggcttccctagatggttccctttgttgctgtctggctttcccgaatctttttaggccacctccaaggactctaaaagggggctattccctggagaccccagagtagggttgccagtcctgcaagtccatagctgagctggaaaggatgcttctgctcacattccctctcatccaggtcctttccttctcgtcttcctctctctcacctacttcctcctcctcctcctgttcctgccttctcttctatcctgcaatttctcccgaatcctgaggggatatccctatgtcccagcccctggtactcccccagccctcagttttcagtcaagttccgtctcctctccagccctatggaagtctcaaggtcacgggacccctaatcagagtggccaatccctgtgtgtcgttcccttgtgtctgttgcttattgggagtaggagttgctcctacccctgtcctggggctgggtgtgtttcaggacagctgcttctgtgcatttgtgtctgcctgcctcatgctctctatagaggaggatggtcatcgtgacagcagcagctcaagttagcatttcaagtgatttgggggtgcaatgataatgaagaatggccattttgtaccagggctctgtattctgcaacagcctgtttgggaggctggagtggaaacaaagggtgggcatcaaagatgagaagccaaagcccctacaactccagccacccagccaggaggggctgtccaatcacattcaggcatgcgaatgagctgggccctgggtgaggtgggggtctggcctagtggggaggggcctggcctgggtggggcagggcctggcctggtccaggcttgggctccattcccatcactgctgtccctcctgaggtctggattggggatggggacaaagaaatagcaagagatgagaaacaacagaaacttttttctctaaaggactggttaaatcaattctgatacagccttacaatacaatagtatgcagctaaaaaataattgtatgtctttatatactaatatgtaataatcttcaggtgaaaaaggcaagccacagaaatgtgtatagcgcacttcccatttgtgtttcagaaaggagtagaatataaayacataattgcttatgtatgcctattcagaataaatgggtaacactgattacttttgggaggggaaccagtaggttgaggacaggagagggaagggtcttaacacttacacccttttgtacattttgaattttgaaccatgtgactgtattacctattcaaaataaacaataaatgggcccaaacaggaattgactttttttttttactgacacttttttttttggtggggaacaggttgggggtagggtaaagtgggttaaggaatgggaccagggatgaaattttctccagttcttgagatccagagaagcaggtgtggcctctagtaactccttttgccttctcatgcttgtacatctttgaggaaatgttaaacctcggttaattccctgacacacacacaccccaccctttccctctctcctgtcttctctctctctcaatgaggggcaatgagaagcagtgaggaggggtgacttctgcttgccagaagcccaggccagggcaggaggtaaagtgcaggaaacattctggatgccactcagcttctgaccagaaaaagaccagaatatgttctgggagctccagcatcatggaagcttctgctaccttctgttctgccccaagcccaagttctgccgtaggtcagtggaacaatggatggggaggaatcaatgagctggagagaaattaggctctaaagaacaggaagaaagccttcagtaaggagcagggggccttcaatggcatagtaattcataatatggccaggagtggaggcaggagtgaaggaggacagggagagatggagagaagggcagactcaagacagagatgcaggagaaagggggatgctgtggcctgctgggacactgatgcaggcttcataatccctctgacctgaggacttgaactttcttttttttttaatttttaatttttgagatggagattcactcttgtcacccagactggagtgcaatggcacgctctcggctcactgcaacctccatctcccgggttcaagcgattctcctgtctcagcctcctgagtagctgggattacaggtgctgccaccacgcccggctaattttgtatttttagtagagacggggtttcactatgttggccaggctggtctcgaactcctgacctaaggtgatctgcctgccttggcctcccaaagtgttgagattacaggtgtgagccactgcacccggcctgaacttctcatttcaatgcatatcctcttgtccccacctccttacggctctttcttatggctacttgcaccatcatcagtgctgggggaaggggagcaaaggaattcagatatccacccccgcaccctcaccatcttgttcactggaatttagttgccttgaaacccatctccagaccaaagtgtttgtatgtgttgtgtgtgtagttgtatgtcaattctcacaagcttttatatgaaaacgtgactggttgtgtctgcttccttatatctcagcatggtgatgatgccacctgccccaggccccagatgaggggaggcagaatggacatctagattgttagaacatcagttcagctcgggtcaggagggccgcaaggtggacctccagccccacaccccaatccaatctcttccttagaccacagaagttgtctggagtcttggcttcagacttgtggtcaattgtctaggagtgattactggctgaggatgtcaggttctgaaggaactggtgctgccaaggctcagatcttcaggacttggggcccagtggcctgagataaaggagttggacaagggaatccctgaggcttgggtcagagggcatgactaggacttctccaggaatgtgaacatggcaaccccctgtgaggacatgaggtgtgcccactcgcctcacctcttttattttttttattttgagatggaatttcactcttgtcgcccaggctggcgtgcaatggcatgatcttggctcactgcaacctccacttcccgggttcaagtgattctcctgccttagactcctgagtagctggtattacaggcacctgccactacgcccggctaattttgtagttttagtagagacggggtttcaccatgttggccaggttggtctcgaactcctgacctcaagtgatccgcctgccttggcctctcaaagtgctgggattacaggtgtgagccacagcacccggcccccagtgacttcttaaacacaaaatcaacaggagctcctggccgcctactttctggacctctcggtggcgtttgacaacaccaactgtcctccctcttggaaccctctcccatcttgactctcccacattgtccccttttcatccatatttgctccttctcagtcttctcaggctccttgacttctgctccccctacctactcatggagccccaagctcttgccttttctagggttctgtccttggtcctcctttctcctctctccagaagtcctctgtgggtgatctcagcctttctttctttctttttttcttttcttctttctttttctttttttccccccttaagaaaaggtcttgctctgtcacccaggctggagtgcagtggtaccaccatggctcactgcagcctcaacctcccagactgaagcgatcctcccacctcagcctcccgagcagctggaattacaggcgtgtgccaccatgcctggctaattaaaaaaaattttttgtaggccaggcgcggtggctcatgcctgtaattggagcactttgggaggccgaggcaggtggatcacctgaggtcaggagttcaagaccagcctggccaacgtgatgaaaccccatctctactaaaaatacaaaaaattagctgggcatggtggcgggtgcctgtaatcccagctactccggaggctgaggcaggagaatcgcttgaacctgggaggtggaggttgcagtgagccgagatcacatcactgcactccagcctaggcaacaagagtgaaactttgtctcaaaaaaaaattttttttgtagagaccatgtctcgctctgttgcctggtctcaaactcctgggctcaagtgatcctcccacctcagcctcccaaagtgctgggattacaggtgtaagccaccacgcccagccagcctttcttactttaactgtcaatatttgtcattggccaaatctctttctacacgtatgtttttggtgttttgttttgtttttgagagaggttctcactgtattgcccaggcttcagtgtaggggtgcaatcttggctcactgcaaactccaccctgtgggctcaagtgatcctcccacttcagcctcccaagaagctgggaccacaggcatgcaccactatacctggctaattttttatatttttggtagatagggttttgccatgttgcccaggctggtcttgaactcctgagctcaaggaatctgcccatcttggcctctcaaagtgctaggattacaggtatgagccaccacgccagcctatatatatatgtattttttaagttattgtagagatgaggccttgctatgttgcccagagtggtcttggactcctgggctcaagccattctcctgtctcttcctcacaaagtgctggaattacaggcatgaggcaccacactcaaccaaaataaatcttttctctgttttttctttttttagtgacaaggtcttgctctgtcacctaggctgaagtgcagtggcacaatcatagtttattgcagccttgaactcctgggctcaagcaatcctcccgcctcaccctcccaagtagctaggatgtgcctggctaatttttttttaattttttgtagagatctctatattgtccaagctggtcttgaactcctaggctcatgtgattctcgactcttggcatcccaaaatgaagggattacaggtgtgagctgctgcacctggtcaacattagttgtctttttttttcttttgagacagagtctcgctctgtcacccaggctggagtgccgtggtgtgatctcagctcactgcaacttctgcctcccaggttgaagcaattctcctgcctcagcctcctgagtagctgggattacaggtgcccaccaccatgcccagttaatttttgtatttttcgtagagatggggtttcaccatgttggtcagtctgttcttgaacctttgacctcaagtgatctgcccatcttggcctcccaaagtgctgggattacaggcgtgagccactgtgcccagccccaacattagttgtcttaatggcatgttcttagccaagagctggaggtaacttccccgctattgaccataacctaccaaaggaccagacacaagttccctggctgggatggattgccttgtggctaggccttgacattagattttatttcctttatcctaaaggtcacacaactgttgcaggacacagaggactagagagactagtatgggtgaatacaggaggatatttattaggtgtgtaccagctcagtggactcacagctaaaaagctgagcactgaacaaagacagagtttagcttatacaggctagtacacagaaacaggacaaaggcagtaaactatgtagtgacaagtcacataatctatagcataactgttgacttggcataacttgtaaaacagaaacttataaattttactgaatacaagtgttggcaaacatagtcataattaattatttaaaggggagacagcaaaggaatttgttcttcttttaactttgctcgggggtgtctggagcctatttctgcaggctaggtcaccatgacctgtctatagccttgcctacagtagaagaaaacttctgtttttcatttaacctttacttttcttggagtgaatacatacagtatttattttctttaaatttctgattcacaacctgtttccaatgaccctttcctgccttagttacagtaattccattgtctgtcttgacttcaagaagctttctagttcttcatctccatgttactgctcattgatgggaatattgggtgtgagttttactctccaacattcgggcgtaagtattaaatgtcacttttctttttgtttctttttctgagatagcatcctcctctgttgcccaggctgaaatgtgatggcatgatcatgccttacagcagctaattcttttttttttttttttttttaaacttttttgtagagatgtgggtcttgctatggtgcccaggctgatcttgaacttctgggctcaagcaatcctcccacctcaccttcccaaagtgctgggattacagatgtgagccaccatgcccggttaccttcctttctttcttttttctttctttcttttttttttttttttgagacggagtcttgctctgtggcccaggctggagtgcagtggcatgatctcggctcactgcaacctctgcctcccgggttcaagcaattctcctgtctcagcctccccagtagctgggactacaggcgcctgccaccacacccagctaatttttgtatttttagtagagacagggtttcaccatatcggtcaggctggtctcaaactcctgacctcaggtgatccgcccgcttcagcctcccaaagtgctgggattacaggcatgagccaccgtgcctggcttgcttgcttgcttgcttgcttgcttgcttgctttccttccttccttctttctttctttctttttcttgtctttctctctctctcttccttccttcccttgccttccctttctttccttccttcctttcttccctccttccttcttttcttccttcctttcctccctccttcccttcctccctccctctctctctccttccttccttccctctgtctctcctttcctttccttcctttcccttcccttctccttccttccttccttccttcctttctttctttctttctttctttctttctttctttctttctttctttctttctttctttcttttcttctttttctctcttcctttctttcctcttactttttttctgagatagagtctagctctgtcacccaggctggagtgtagtggcacaatcttgcctcactgcaaactgcacctcccaggttcaagtgattcttgtgcctcagcctcccaagtagctgggattacagacgtgggccaccacgcccagctaatttttgtatttttagt

SEQ ID NO: 93630 - DNA, 25284 bp, Homo sapiens
tcaggcacagtggctcacacctataatcccaacactttgggaggctgacagaggaggacacttgagcccaggagttacagaccagcctgggcaacaaagtgagaccctgtttctacaaaaaatacaaaaaattcgccgggtgtggtagcaccggcctgtagtcccaggtactggagaggctgagctgggaggattgcttgggacccaggaggtcgaggctgcagtgagcattgatgggaacagtgcactccagcctgggcaacagagtgagacccatctcaaaaacaaaacaaaacaaaacaaaacaaaacaaacctattgtaggatgataactgagtaaaggaaaggtggctcctctctcaacagaatccagagcccccacccagaatagaagatacagcttcaggtaaaatcagactttctttttggtagtaaatgcaatttttggatgaggtgtgtggtaagttacagctccttttccctctttgctttctcgtctgcaaataaacttgttcgagtgaatgagtcaaccttgccctgggagaatgtgccagggccctgggcccagctgcacttactcatcagcagaccagactgtacttcctggcatctttccttcatgttcttctcaagatccaaagcctctggatttctagttgtggggaaaatgcctgaggagtggcttgcttgggtacctaccaaagaggagcccaaatgattttccatcctcattccttccccaactcagctggccatttccctagagggtgttaacgaatcttctctaccgaggacaaaataatagggaactcactgatatttctacaaaggaaatcaaaatatttcatcccaaactatggctcccaatataataagtactttttttgttcgtttgagacagggtctcgctctgttgcccagcaggagtgcagtggcacgatcacgactcactgtacctcccgggttcaagtgatcctcccacttcagcctcccgagtagctgcaattacaggtgccagccacctcactgggctatttttttttttttttttgaaatagggtctctttctgtcacccaggctggagtgtaatggtgtgatctcggctcgctgcaacttccacctcctgggttcgagggattctcttgcctcagcctcctgagtagctgggattacaggcgcccaccactacacctggctaatttttgtatttttagtagagatggggtttcaccatgttggtcaggctggtcttgaactcttgaccttgggtgatccacccacctcagcctcccaaaatgcttggattacaggcgtgagccactgcacctggccaatttttgtattttttgtagagatggggtttcaccatgttggctaggctggtctcaaactcctaagctcaagtgatccaccaacctcagcctctcaaagtgctgggtttacaggtgtgagccatcgcaccaggccgtgactattttaaataaaaaacccttgagaggttttttcacccttgggagcctggaagagattttttcccctatctttcacctataaagataggactggccgggcatggtggctcatgcttgtaatctcagcactttgggaggccgaggcgggtggatcacctgaggtcaggagttcgagaccagcctggcccaacatggcaaaaccccatctctactaaaaatacaaaaattaatcgggcctggtggcacatgcctgtaatcccagctacttggggggctgaggcacaggaatcggtggatctcaggaggcagaggttgcagtgagccaagatcatcgcattgcactccagcctgggcaacaagagtgatactccgtctcaaaaaaaaaaaaaaaaaaggactgacacaaaagaacaattgttcttctccttcctttatcccattatccatcacagaaaagaagaccaaaaatgtaaccataaaaaagtctcaacagaccctttttcaagacaatgactgtctctgaggaccatttaaaatccagggagaactatttacaagttaatttctgttcctcgatccaatcattctccctctgcccttcgacagaattcctcttctcctccttcccataacctgtttttaacaggatccaagccacccattctttctgcaacctcaagatggtggatgagcttccatacctcactgggaagttggatcttcattcttaagcctcccatgtatacatgttaaatacatttgtaatctttttctcatattaattaatctgccttatgtcagtgacttttcagcgaacttgtaggtagtcactcacataaggatcctccagtttacatagttttgtaaatgtcaggtcaccctgtcccactagaccaccaaggtcctggaggacacctgggatttaacttttttttttttttttttttttgagacagtctcgctctgtcactgaggctggagtgcagtgtcaggatctccactcactgcaacctccacctcccgggtttaagtgattctcctgcttcagcctcccgagtagctgagactacaggtgcccctcatcatacccggctaatttttatatttttagtagagatggggttttgctatattggccaggctggtcttaaactcctgacctcaggtgatccaccctcctcagcctcccaaagtgctgggattacaggcgtgagccaccatgcccagcctggcttttaacttttaattcctcagagagccaggcatggtgctttgctcaggaaatgttggttgaattaaaccggagcacttcttgaaaagggaaaataacaaagagttagaaggagatggcgggaacccctctctggagatagttctttaaattagtggattctgcagggcactgttgctcatacctgtaatcccagcattttgggaggccaaggcaggaggaccacctgatgccgggagtttgagaccagtctgggcaatgtagagagacccccatctccacaaaaaataaaaagttagctgggtttggtggtgtgcgcctgtaggcccagctacccagagactgatgcaaaacgatcccttaagcccaggagactgaggctgcagtgagctgtgatggtgccaccgcactccagcctgggtaacagagtgagaccccgtctcaaataaacagataaatgagtggattctcagcaaaacttctagccactcgcctcatatatccacaagacctttgagaatccacggtgtctcgatgcagtcagctttctaacaagctggggcctcacctgttttcccacggataaaaacgtgctggaggaagcagaaaggggctggcaggtggaaagatgaggaccagctcatcgtctcatgactatgaggttgctctgatccagagggtccccctgcctggtggcccaccgccaggaagactcccactgtccctggatgcccagagtgggatgtcaactccatcacttatcaactccttatccataggggtattcttcctgaggcgtctcagaaaacagggccctccccatatgctgaccacataatagaacccctcccaactcagagaccctggctgctagctgccctggcatgacccagacagtggcctttgtatatgtttttagactcaccttgactcacctctgaccatagaaactctcatcccagaggtcactgcaatagttactccacaacagaggcttatctgggtagagggaggctccctacctatggcccagcagccctgacagtgcagatcacatataccccacgccccagcactgcctgccacgcatgggcttactttacacccacccacagtcaccaacacattacctgctctccaaggttaggcgtggcaggagaagtttgcttggaccagcagaaaccatgcagtcaaggacaactggagtcagcatgggctgggtgcgagcccttggtggggtggggaggagactccaggtcatacctcctggaggatgttttaatcatttccagcatggaatgctgtcaacttttgccacagattcattagctctgagtttcttttttctgtccccagctaccccttacatgtcaatatggacttaatgatgggaaattcaggcaagtttttaaacattttattccccctggctcttatcctcaaaaaatgcatgaatttggaggcagtggctcatgcctgtaatcccaatgctttgctaggttgaggcgggaggatcacttgaagccaggaatttgagaccagcctgggccgcatagtgagaccccgtttctacaaaaataaataaataaataataaataatagtgatatgaagcatgattaaatagccctattttttaaaatgcatgagttcgttacctgattcattccctggttcctttcacagtcctccgtgacccaagtgttagggttttggtctctctactatttgtaggctgatatatagtatacacacacacacacacacacatatacacacacacagtgtatcttgagctttcttttgtatatctacacacatatgtataagaaagctcaagatatagaagccctttttcaaaaataactgaaagtttcaaactctttaagtctccagttaccattttgctggtattcttatttggaaccatacattcatcatattgttgcacagtaagactatacattcattattttgcttaaacgtatgagttaaaacacttggccaggcatggtggttcacacctgtaatcccagagctttgggaagccaagactggcagatctcttgagctcaggaattcaagaccagcctgggcaacatggaaaaaccccatctctacaaaagatagaaaaattagccaggcatggtggcgtgtgcctgtggtcccagctactcaggaggctgaggtgggaggatcacattagcccaggaggttgaggctgcagtgagccgtgattatgccactgcactccagcctgggagacagagtgagaccctgtttcaaaaaaaagagagagaaaatttaaaaaagaaaacaacaccaagggctgtaactttaaggtcattaaatgaattaatcactgcattcaaaaacgattactttctggccctaagagacatgaggccaataccaggaagggggttgatctcccaaaccagaggcagaccctagactctaatacagttaaggaaagaccagcaagatgatagtccccaatacaatagaagttactatattttatttgttgtttttcttttgttttgttttgttttgttttgttttgttttagagactggggtcttgctcgattgcccaggctgtagtgcagcggtgggacaatagctcactgcagactccaactcctgggctcaagcaatcctcctgcctcagcctcctgaatagctgggactacaagggtacaccatcacacacaccaaaacaattttttaaatttttgtgtagaaacgagggtcttgctttgttgcccaggctggtctccaactcctggcttcaagggatcctcccacctcagcctcccaaattgctgggattacaggtgtgagccaccacaaccagccagaactttactaattttaaaattaagaacttaaaacttgaatagctagagcaccaagatttttctttgtccccaaataagtgcagttgcaggcatagaaaatctgacatctttgcaagaatcatygtggatgtagactctgtcctgtgtctctggcctggtwtcggggaccaggagggcagacccttgcactgccaagaagcatgccaaagttaatcattggccctgctgagtacatggccgatcaggctgtttttgtgtgcctgtttttctattttacgtaaatcaccctgaacatgtttgcatcaacctactggtgatgcacctttgatcaatacattttagacaaacgtggtttttgagtccaaagatcagggctgggttgacctgaatactggatacagggcatataaaacaggggcaaggcacagactcatarcagagcaatcaccaccaagcctggaataactgcaagggctctgctgacatcttcctgaggtgccaaggaaatgaggatggaggaaggaakgaatgttctccatgactttgggatccagtcarcacattacctccrggtgaattacyaagactcccaggactggttcatcttggtgtccgtgatcgcagwcctcaggaatgccttctacgtcctcttccccatctrgttccatcttcmggaagctgtgggcattaaactccttygrgtagctgtgattggagactrrctcaacctcgtctttaasyggtaagaaccatatagagaggagatcagcaagaaaagaggctggcattcgctctcgcaatgtctgtccatcagaagttgctttccccaggctattcaggaagccacgggctactcatgcttccaacccctctctctgactttggatcatctacataaagggggaagacagaaaaaatcctaccagtgagttgaaaatacaggaaagcctatttcatatgggttaaagggtaggacagttgaatttcgtgaaaagtctgagttatataggctttgagcaaagagttttattartatgaagcagaagaggtaacataaagaaagatgtatggggccaggcatggtggctcacacctgtaatcccagcactttgggaggccgaggtgggcgaatcactcctgggtgaactcaggagttcaagaccagcctgggcaacatggcgaaactccatctctacaaaaacattacgaaaattagctgggcgtgttggtgctgtagtcccagctactcaggaggctgaggtgagaggcggaggaggttgcagtgagtcaagatcatgccactgcactccagcctgggcaacagagtaagaccctgtctcaaaaaaaaaaaaaagatagatgatgtatgctgtatgaaaaaaggaaacacacagatgattcaacagcctgttttgtggggtaatgaaaagtcaccctgggaactgggctccagccctcgttctgccacccaccaactacatgtccttggcaagtcatatcaattatctgagtttctgttttataatctacaaataggttatctctggcagcttaataataatcagggttaacatttattaaacagtgtgtgccagtccatgtgctatgtgcttttctgtgaggtagttactgctatttacagaaacagtagatgcagagaccaaggtgctgagttaaatgattaggccaacaaggttagtacatgccgagccaggatggaagcccaggtaggcaggctggcttccgcggcaatgctcttatgaactatgttacgtccagtgctgataaactgactctctggggagcaggggaaagccctgagtttagcatttgccaatttctatcacgtaaacattcccattctggccactttctttctttctttcttttgtttgtttgtttgagatggagtctcgcactgttgcctggctggagtgcaatggtgcaatctcrgctcactgcaayctctgcctctccggttcaagtgattctcctgcctcagcctcccaagtagctgggattacaggtgcccgccaccatgcccagctaattttttttgtatttttagtagagacatggtttcactatgttgactaggctggtctcgaactcctgacctcatgatctgcctgccttggcctccctaagtgctaggattacaggcgtgagccactacacccagccgcatgattctaaaaaataaaaagatgaagtgttattccaaacatctgatctccattgaagaaccatgcaatctctctgggttgatagaggccagagttagtggctctccctgatttcggtgagaaatcactattccaccatcacgggataaaaggcatcctgactggcggttgacacctatttccacagtgaaagatatatctagtacttttaaaggggaagtggtttgtctgagatactctgtttcaaagtagagaggatacagaacaagcatctgaagctatatacatccttacagagagcaattctgatggaaatgcaggccatgtttccctggggggggctcgtcctaggggctggagtgcattctctgatgtcagaggaaatgcaagattccctgaggcctgagggaacccatggtatatgcaagtccaagtttcaaactgtagttccatatgcattcttccaggacaaatacttcttgaggttaaaaaaaaaaagtcacatagctgccattttatggatttcaggatttttttttttttttttttgagatggagtcttgctctgtcacccagcctgtagtgcagtggcataatctcggctcacggcaacctccgcctcccaggttcaagcgattctcttgccttagcctcccgagtagctgggattacagtcacgcaccaccacatctggctaattctttatattttttggtagaaacggtgtttcaccatgttggccaggctggtctcaaactcctgacctcatgtgatctgcctgccttggcctcccaaagtgctgagattacaggtgtgagccaccgcgcctgcctggagttcagaatcttgggcttcattatttgtgtttaaatagatcatacagtcaggcacggtggctcatgcctgtaatcccagcactttgggaggctgaggtgggaggattgcctgagttcaggagatggagaccagcctgggcaacatggtgaaaccccatctctactaaaaatacaaaaactagctggatgtggtggcacacacctgtagtcccagctattcaggaggctgaggtgggaggatcccaggaggtagaggtcacaatgagccgagattgcgccactgcactccaggctgggttactgagccagatcctgtctcaaaaaaaaaaaagataatacattcaaacagttcaaaatgcaaaagttacatacataaggaagtgtcatgaaatatctccctctcacacttctccccagccacccagttctcccttctagaggcaacatgtgaaatccttctcaggctacactcttcttgaaggtgtaggctttgggcaaaagcattcattcagtaaccccagaaacttgttctgtttttccataggattctctttrgacagyrtccatactggtgggttttggatactgactactacagcaacacttccgtgcccctgataaagcagttccctgtaayctgtvagaytggacyaggtaagcgtcccagcccctgcagacagaagctgagtggacctygtttacctgttatggatgaaactgaccttgaggggacatgaggagagccattcctttgtacttttgtcatgctcttcaattggcacaaattaattcacttctgcaatactttcctgaatagcacagtagtattggaaatctgcctrttacagaacctggakggagtccagagaggcacgggcayccatgggcaaagggctcgtgagagtcaccgccctgcagcgctgtgtcctgagaaaggagggggcagaagcctgagcttctgggggtccttcccaatggcctggcccactggatgtgccctcctgagctgaccgtccaatcccttgccctctctgtgcctacgttttattagttacagccagatggttactgtcaaatcaaatgatagatttcattttcagtatgtaataggaagcccctccctcaccctaaagtctcagctgccctctaagactagtactctctaaggtactagtatcccttcctcagagaccctttccctgaccccaaaactagggaaggtcccttagttatttgctctcacagaccacgcatttacctcagagcatattcactcattcagctgttacttaccaagcacctactgggagctatacactgttctatgtgctagggatacctctgtcagtgaacaacacagacacaaagatccctgcccttgtggagctgaaatctgaatagaggaggtgaaatatacaaaaattataataaataagtaaactaggccagttgtggttgctcatgcctgtaatcccagcactttgggaagccaaggtaggtagatcacctgaggtcaggagttcaaraccagcctggccaacattgcaaaatcctgtctttactaaaaatggaaaaattggtcaggcgtgatggcacacgcctgtagtctcagctacctgggaggctgaggcaggagaatcgcttgaacctgggaggcagaggttgcagtgaaccgagatcggaccactgcactccagcctgaatgacagaacgagactctgtctcaaaaaaaaagtaaactattaatatgtaggataggccaggcacggtggctcaccctgtaatcccagcactttgggaggctgaggcgggtggatcacctgaggtgaggagttcaagaccagcctggccaacatggcaaaaccctgtctctactaaaaatacaaaaattagctgggtgtcctggtgcatgcctgtaatctgagctactcaggaggctaaggcaggagaatcgcttgaacctgggaggtggtgagccaagattgcgccattgcactccagcctgggcgacaaaatgagacaccatctgaaaaaaaaaaaaaaatatatatatatatayacacacacacacacacacacacacacacacacacacatataatactagaaaatgattgtttataggcaaaaaaaaaaaaaaagaagaagaagaagaaaaggaaaggagaaggaaagaaggaccaaacatcttttgtagaaatatgtttgctttcatcataacagcttgttatcaaggatgaatttctccctgaaattaatggaggcacagactggaaagtttaaagtggctttaagaggttattttatttagtcctctgtcttaatagaagcaaattattatctctgctccttaggtagagtagctaaggctcagaaagtaggccgggcgcggtggctcacgcctgtaatcctagcactttgggaggccaasgcaggtggatcacctgaggtcaggagtttgagaccagcctggccaacatggtgaaacctcgtcactaataaaaaaatacaaaaacttagccaggcatggtggcgggcgcctgtaatcccagctacccaggaggctgcggcaggagaatcacttcaacccgggaggcagaggttgcagtgagctgaaatcacaccactgcactccagccttggtgacagagaaagattctgtcaggaaaaaaaaaaaaaagtttaaatgaattacccaaggtatataattgttagtgttagaaggaagaagaagggagggaggaaggaagggagaaagaaagggaaggaggaagggagggagggaagaaagcctttatttatctatggggttccctggaaagcaggctgaaatggagattcacgtgcaggagtttagatactctggggaactatacttgtagaagggaaggaacaggaacagggcagaaggagaggtccggttgtgattctgcctcatccaaccccacagcgagctctgaagctggggatggctcctcagagttggtccaagttgggacaagggaatcagaccctggggagagcgtaaccttgatcaaggcgactctctttagcccagggcaatgccaggagaaggctgagagcagaragccatctaccatcacactctcaacagctacgaaataagtcctgcagttcaggagggaggtctgggcggcacatctcaggaccctctatctctcagggtagaggaattaagaatgggatgggaaccagacsggccatggtggctcacacctataatcccaacactttgggaggccaagggtaggaggattgcttgagcccaagagttcaaaaccagcctgggcaaaaacaatcaaacaaacaaacaaaacacatttaaaaaatttgctgtgtrtggtggtgtgcacctgtggtcccagctactcagggggctgaggygggaggattgcttgagtccaggaggtcgaggctgcagtgagctatgatcatggcactgcattgcagcctaggagacaaagcaagacactgtctctaaaaaaacaaaaaacaaacaaataaaaaaacggaaccggttgcaagcagggttaaatagcgtggtcagagtaggactcactgagaatatgagatctgagtcaagtcttcaaggatgkgaggaagtaagtttctggcagaagagctgtgaagggctgtctggccagagaagattgcaatgcaaaagccctgaggtgggaacgtgtttggtgtgtttaaaggaaagcaatgaggccagtgtagccagaacagagtgtgcaaggagagaaggaacagaagatgtggagggcagatcagtttgtaattgtacgcccagtatgctgattctttgtgtaatctccagactgtattaaactgcaagagcagggcccctctctggctttgctcaycattgtattcccagagccttgcacaatgcttggtgcataggagatggaaatttgttaaataaatgaattatggataacgaatggatggtaagatgggtggatggatggggggtgaacggatggatggggggtgaatggatggatgaatgggtagatggrtggatagggggatggctgggtggctgggtagatgatgcactgtctcccagatgaggaccttttcacctttactccattctctttcctgccctttagggagcccctctsgccwtgccatgggcacagcaggtgtatactacgtgatggtcacatctactctttccatctttcagggaaagataaagccracctacagatttcggtaagaactcaccactggggtgtaggtggtggagggcaggaggcagctctctctgtagctgacacaccacgtrttcttcctcacatccccctagcccgctcccacacctgggcagccgctgattaagagttgtggcactttggatagggrtaaacctcagagtcagggaatgtttgggctgaaagggatccagtagtgcaatccgttgttttacagataaggaaacaaagcccaacaccatgaagggacttataaaaatmaggtagtgargtagcagcagggcttaaataaaaacccatgtctgtaccaaccacagagtcacccatccaggttaaaataaccagagaaacagaagatattcctactacagagaattccgggtgtgcagccacagtgcaaatcctttttatttttatttttgagatgcagtctcgctctgtcatccaggctgaagtgcagtggcacgatcatgtctcgctgcaacctctgcctcccaggctcaagcgatcctcccacctcagccatctgagtagctgggaccacaggccacacaccacacccagctaatttctcgtatctttttgtagagacagagttctgctatgttgcccaggctcaggctggtcttgatctcaagcaattggcttgcctcagcctcctaaaatattgggattacaggcatgagccaccgcgccagccatgcaaatccttaattatcaaacagataaaatagggaagttaaaattcatatacacaagggttaaccacttgccacaggcattttttttttttttttgagacggaatctcgctctgttgcccaggctggagtgcagtggcgccatctcgcctcactgcaacctccgcttcctgggttcaagctattcttctgcctcagcctaccgagtagctgggactacaggcacgtgccaccacacctggctaatttttttatttttagtagagatggggtttcaccatattggccaggctggtcttgaactcctgacctagtgatccatccgcctcagcctcccaaagtgctgggattgcaggcatgagccaccgcrcctggccttttttttttttttttgagacggagttttgctcttgttgcccaggctagagtgcagtggcgcagtctcggctcactgtaacctccacctcctgagttcaagcaattctcctgcctcagcctctcaaatagctgggattacaggcrtgagccaccccacctggctaattttgtaattttttttttagtagagatggggtttcacctgttgatcaggctggtctcaaactcctgacctcaagtgatccacccacctcggcctcccaaagtgctgggattacaagcataagccaccgtgcctggtcaattttgatcttttttaaagagacaggggtcttgctatgttgcccagactagtcttgaactcctggcctcaagtgatcctctcacctcggcctcccaaagtattgggattacaggtctgagccgctgcacccagcccccaacaggcatctttggacttttgagtactggctttaatttacaaaaattccactgagagcacctaagtttgccaggctccaacatttctgcaggggctgwtttctttgctgaaggatctgcacctgtgttctgttatggttgcctcttctgttgcaggtgcttgaatgtcattttgtkgttgggattctgggctgtgcagctgaatgbctgtctgtcayraatctamcttgctgctcattttcctcatcaagttgttgctggagtcctgtcavgtatgggctgatctgactcccttccttctcccccaaaccccattccgtttctcyccctaatcaggacaaaatcccagcattccagccacatcctgtgtgtaatcagtactgttagcatttctgtgggttgaaagtcaagaatgagcaacttgaaatgattaatttctataagagtgcccagatctatagaatgaattgtgtagaagttaccatacatcaaattaacgcaccaaattgaattagcttgaaatctcagagctttttacaatctttatttcttactggtcttcaacaggccctaatttacttttcagggaatctgccaaatttaacaaattaacacgatgtcctaggaaagctgttcatttaaatacattcatttgcaaacctaatagataactgcagttgatctcttttataggttcagagttttgaatatgtttttttttgttttttttttttgagatggagtctcgctctgtgacccaggctagagtgcagtggtgcgatctcggctcactgcaagctccacctcctgggttcacgccattctcctgcctcagcctctccgagtagctgggactacaggmgcccgccaccatgcccggctaattttttgtatttttagcagagacggggtttcaccgtggtcttgatctcctgacctcgtgatccgcccgcctcggcctcccaaagcgctgggattacaagggtgagccaccgcaccctgcctgaatatgtgttttcttagatccaattaacaagggtaagacaagatttaagttaagcataagaaagattttgtgggaggcactggaatataagaccttaamaaaactgtggaatttctcccctggagatttgtaagaacggaacatagcagcattcaaagaagaatgttgagaacaagggagataatggtttcatggtaatcacaaaagtaacacagcatttagtactgggttccatgtttgaggaagaacctggaagccatatcacatgaaaaacctgggaatgtttaggttagagagaataactgtgttcaaatgtgtgacagagggactagattcatcacttactaactcctgcagaaagaactgagaaaaatagacagtattagagggggaccagtttcacacagacaaggaagaactattcagcaatcaattccgttcaaagataaaatggactgttatagtgggggtgagctccctacctctgagggtatttcaagtagagataggaggacctcctggtaggaaatttgcatacggtgggagattgtacgtgatatggcacctccatctgaaagagtctatattgagggcaggctggagtcacacatgggaataagccaggcgaccctcccatctgccatctgtgatttaattccacagtcgcagaacggatggcatgtcacccactcctccaaacccacctctagcaaaggtcccaaatccttcctatctctcacagtcatgctttcttccactcaggcattgctgttrcagaaactttcagccacatccacagcatctataatgccagcctcaagaaatattttcycattaccttcttcctgttcagcttcgccatcvgattttatctgctgctcaagggactgggtgtagacctcctgwggactctggagaaarccyagaggtggtgcgagcagccagaatgggtccacattgacaycacacyctttgccagcctcctcaagaamcyggkcacgctctttskcctggggctggctctcaactccagcatgtacagggagagctgcaaggggaaactcagcaagtggctcccattcygcctcagcyctattgtagcctccctcgtcctcctgcacgtctttgactccttgaaacccccatcccaagtcgagctggtcytctacgtcttgtccttctgcaagagtgcggtagtgcccctggcatccktcagtgtcawcccctactgcctcgccyaggtcctgggccagccgcacaagaagtcgttgtaagagatgtggagtcttcggtgttyaaagtcaacaaccatgccagggattgaggaggactactatttgaagcaatgggcactggtatttggagcaagtgacatgccatccattctgccgtcgtggaattaaatcacggatggcagattggagggtcgcctggcttattcccatgtgtgactccagcctgccctcagcacagactctttcagatggaggtgccatatcacgtacaccatatgcaagtttcccgccaggaggtcctcctctctctacttgaatactctcacaagtagggagctcactcccactggaacagcccattttatctttgaatggtcttctgccagcccattttgaggccagaggtgctgtcagctcaggtggtcctcttttacaatcctaatcatattgggtaatgtttttgaaaagctaatgaagctattgagaaagacctgttgctagaagttgggttgttctggattttcccctgaagacttacttattcttccgtcacatatacaaaagcaagacttccaggtagggccagctcacaagcccaggctggagatcctaactgagaattttctacctgtgttcattcttaccgagaaaaggagaaaggagctctgaatctgataggaaaagaaggctgcctaaggaggagtttttagtatgtggcgtatcatgcaagtgctatgccaagccatgtctaaatggctttaattatatagtaatgcactctcagtaatgggggaccagcttaagtataattaatagatggttagtggggtaattctgcttctagtattttttttactgtgcatacatgttcatcgtatttccttggatttctgaatggctgcagtgacccagatattgcactaggtcaaaacattcaggtatagctgacatctcctctatcacattacatcatcctccttataagcccagctctgctttttccagattcttccactggctccacatccaccccactggatcttcagaaggctagagggcgactctggtggtgcttttgtatgtttcaattaggctctgaaatcttgggcaaaatgacaaggggagggccaggattcctctctcaggtcactccagtgttacttttaattcctagagggtaaatatgactcctttctctatcccaagccaaccaagagcacattcttaaaggaaaagtcaacatcttctctctttttttttttttttgagacagggtctcactatgttgcccaggctgctcttgaattcctgggctcaagcagtcctcccaccmtaccacagcgtcccgcgtagctgggactacaggtgcaagccactatgtccagctagccaactcctccttgcctgcttttctttttttttctttttttgagacggcgcacctatcacccaggctggagtggagtggcacgatcttggctcactgcaacctcttcctcctggttcaagcgattctcatgtctcagcctcctcagtagctaggactaccggcgtgcaccaccatgccaggctaatttttatatttttagaattttagaagagatgggatttcatcatgttggccaggctggtctcgaactcctgacctcaagtgatccacctgccttggcctcccaaggtgctaggattacaggcatgagccaccgcaccgggccctccttgcctgtttttcaatctcatctgatatgcagagtatttctgccccacccacctaccccccaaaaaaagctgaagcctatttatttgaaagtccttgtttttgctactaattatatagtataccatacattatcattcaaaacaaccatcctgctcataacatctttgaaaagaaaaatatatatgtgcagtattttattaaagcaacattttatttaagaataaagtcttgttaattactatattttagatgcaatgtgatctgaagtttctaattctggcccaactaaatttctagctctgtttccctaaacaaataatttggtttctctgtgcctgcattttccctttggagaagaaaagtgctctctcttgagttgaccgagagtcccattagggatagggagwcttaaawgcatccacaggggcacaggcagagttgagcacataaacggaggcccaaaatcagcatagaaccagaaagattcagagttggccaagaatgaacattggctaccagaccacaagtcagcatgagttgctctatggcatcaaattgcaacttgagagtagatgggcagggtcactatcaaattaagcaatcagggcacacaagttgcagtaacacaacaagactaggccagctctggaatccagtaactcagtgtcagcaaggttttgggttatagttcaagaaagtctaaacagagccagtcacagcaccaaggaatgctcaagggagctattgcaggtttctctgctaagagatttatttcatcctgggtgcagggttcgacctccaaaggcctcaaatcatcaccgtatcaatggatttcctgagggtaagctccgctatttcacacctgaactccggagtctgtatattcagggaagattgcattctcctactggatttgggctctcagagggcgttgtgggaaccaggcccctcacagaatcaaatggtcccaaccagggagaaagaaaatagtcttttttttttttttaatagagatgggggtctcactatgctgcccaggctggtcttgaactcctgggttcaagtgatcctcctgcctcagcctcccaaagtgctgggattacagtgtgagccactgcgcttggccagaaatggttttgatctgtctgaactgaaccctactgcttaggcatagccccatccttgataatctatttgctcccaaggaccaagtccaagatccttacaagaaaggtctgccagaaagtaaatactgcccccactccctgaagtttatgaggttgataagaaaacataacagataaagtttattgagtgctaactttatgccagattctgttctatgtactttatttatacaattaactcgcttagttctcccaacatctctgtgagttggctactgtcatttatccttatattacaaataggtccagaggggttagtcatcttgtccagaatggtggaaccaggttaaggatcaggcagtctgggctgggcatggtggctcacatctgtaatcccagcactttgggaggctgaggtggcagattgcctgagctcaggagttcgagaccagcctgggcaacatggtgagacccccgtctataccaaaaatacaaaacattagccaagcgtggtggtgcatgcctgtggtcctaactactcaggtggctgaggtgggagaatcccttgagctcagaggttgcagtgagccaagattatgccactgcactccagcctgggtgacagagtgagaccctgtctcagaaaaaaaaaaaaaaaagaagcaagcagtctgggctgggtgctgtggctcgcgcctgtaatcccagatacaaaataatcattttgtaatatatcctgcttattagacagaacattttgatcactcatctgttccctaagttatagatttacgtccactttagaaatggcttgtgaggcaagtttaagtgaccgatgacagttttaaagcaaggtccatgtcatgttatggcataatttggtagaatgttctagtagtgtatcagttttcaggtggtaggcttgaggatgatacacacacacacacacgcaatgcaattctattattgcccaaagaaaatagacccattaaggaagtccaacttctgctgcgtggaccagtgctgccacatcacacatagaccaaaggcttaggtttttgtggttttggttatttattttatctttttattttattttatcttattttattttattttattttattatttgagatggagtctcactctgtcacccaggctggggtgcaatggcgcaatctcagctcactgcaacctccaactcctggggctcaaatgatcctccagcctcagcctcccgaatagctgggactacagatgcgtaccaccatgcctggctaatttttttattttttgtagagacagggtctcaagcatcctcccgccttagcctcccaaagtgctgggataacaggcatgagctgctgcactcagccatgtttttgatttttaacaaaattgtaacaccttaaaaaaaatgtataacaaggccgggcacggtggctcatgcctgtaatcccagcactttgggaagccaaggcaggcagatcacctgagatcaggagttcgacctgaccaacatggtgaaaccgcgtctctactaaaaatacaaaaaattagccagacgtggtggcacatgcatgtaatcccagctacttgagaggctgagacaggagaactgcttgaaccggggaggcagaggttgcagtgagcccagatcacaccattgcactccaacctgggcaacaagagtgaaactccatctcaaaaaaaaaaaaagctgtataacagcttgagatataattcacaataccatacaattcactcatttaaagtgtacaattcaggggttttcattccactccaacccactcaagcctaggcaaccactaatctactttctgtctcatagatttgcctatttggggcatttcatataaatagactcctacaatatgtggccttttgtgtctggcctctttcacttagcatgatgttttcaaggtttatctgtgttataacatatattggtacttcatttctttttatggacaagtaatattccattgtatgaatatataacattgtatgaatataccacattttatttatctgtttatcaggccaggcatggtggctcacatctgtaatcccagcactttgggaggctgaggcaggaggattacttgagcctaggagttcaaaaccagcctgggcaacacagggagacctcgtgtctacaaataataaaagattagctgggcatggtggcacatgcctgtagtctcagctactcaggaggctgaggtgggaaggatggcttgagccttggagatggaggctgcagtaagccactgcactccagcctgggcaacagagcaaaagcctgtctccaaataatgaatgaatgaatgaatgaatgaatgataaataaatatttgttaatcagttgatggataactggcttgtttctgctttttggctattatgaataacagtgctatgaacatttgtgtgcaagtcattgtgtggttgcatagtttcatttctcttgggtacattcttaggagtggaattgctgggagatgtgggaactctatatttaaccctttaaggaactgccagactgttttcccgaaggcttagttaggaaagttttacagtatttttggttttatcatctcttgatttcctaggatcataccctttatcataactttatctacttctatgctttggaaaggtttcaaaggaagaccgattaggtggtcagatttttctttttccttttttttttttttgagacagagtctctctctgttgcccaggctggagtgtggtggcaccattactgcttactgcagccttgacctctcaggctcaagtgatcctcctgcctcagcctcccatgtagctgggaccacaggcacgcaccaccacacctggcttttttttttttttttttttttttttttttttgtagagacaaggtctcactatattgcccaggctggtctccaactcctgggctcaagtgatcctctttccttagcctcccaaagtgcggggattacaggtgtgagccactcacccgaccaggtggtcagattttacgtgaggaactctcagcgcactcctccacttgcgttgccaatttctttgttattccaacaggcattccgggaacgttacatttgaagacatgtctgcatatctgaaattccagccctaattaattgactcattgtttgcaacctgtcaaaatttgctgacttgttttctgaaaaccatgacttcagctgctgaattattaatattcattgacttcactctgcagtaactgctgaactaggctgtaaggcctgtttgtgtgaataagataggacgataccatttgtatgcaaaagtttttcaagtgtctccttgataataggaaacactctggctaaatagccttctggttatatggttaaggaaataattgactagaagtggcatgaagaagcagacaacaaaagtcacttccatcagggaaccaagaccttcattaatccagagggaaaactagtgatttttctagtccagtgatgggcaattcgaagctcaaagtctaatttcagggagaaagatgaaaaacctgcatccagccgggcctggtggctcacagctgtaatcccagcactttgggaggtcgaggtgggtggatcacctgaggccaggagttcgagaccagcgtagccaacatggtgaaaccccgtatctactaaaaatacaaaaattagccgggcgtggtggcttatgcctgtagttccagctacttgggaggatgaggcaggagaatcgattgaacctgagaggttactgtgagctgagattgcgccactgcactccagcctgggcaacagagtgaggctccatctcaaaaacaaacaaacaaacaaacaaataaaatacaaagctgcatctggactgggcatagtgtcttatacctgtaatcccaggactttgggaggtccaggtaggattgcttgaggccaggagttcaagagcagcctgtgcaacatggcaagaccctacctatacaaaaaaaaaattttttaataaaaattaggccgggtgcagtggctcatgcctataattccagcacttttgggaggtcgagggaggcggatcacttgaggtcaggagttcgagaccatcctggccaacatggtaaaaccccgtctctactaaaaatacaaaaattaactgggcattgtggtgcgtgcctgtagtcctaactactcgggaggctgaggcagaagaatcacttgaacttgagatgcggaggttgcagtgagccgagatcttgccactgcactccaacctggtgacagagtgagactctgtctcaaaaaaaaaaaaaaaaaaaaaaaaaatgagccgggcattatggtgtgctcctgtagtcccagctactcaggagacgaggtgggaaaattggttgagcctgagagggtgaagctgcagtgagccatgattgtgccactgtactccagcctgggtgacagagcaagaccctgcctctaaaaaaataaatacataaaaataaagctgcatctgggctgctcttctcaataaaagaaagaagtctataaatattttttatttgtcctgagttggcctttatttcaaaaaagaaagttgctcactataaattctactcaaaaacatttttcatttcatgaatatagaaatgaaggccaagagaggtgaaatggtgcctctaagtcacgtaactaacatgttcacaggtctcttgattctcagcaaagagcagtctcctctctgccagtctcctgcgtatatttgggctgctgtgtcaacatgcagctgttgaaacagaagtaaaagacatatgtaaacagtacagtcagattatttgagccagactgagggcttattaaccaaattaaaggcaaagctagaataattgtgtttgaagtggccttctcctaattatgttatgggtttctttcttcttttactttcgttaagtctccccaggacacagggtaataactaactacaaccaggaacagctgggtgtgtttatggggtttggggttttttttagcaagaagctagttttccagccagcaaattttcaatactttcctttctgccacctcctcactttcttcttctgctcttctcattccatagttattgccctcagaacagttcaactcagcttcaacactggaatggtctcattctgctccatcacagaactggggattctaatcctttattattctgtgctccttcctctctctccagaggcaaaaagaatgaaaattggggccgggcgcagtgcctcacacctgtaatctcaacactttgggaggccgaggcaggtggatcacttgaggtcaggagttcgagaccagtctggccaaaatggcaaaaccccgtctctactgaaaatacaaaaattagccagacgtggtagcacatgcctgtaatcccagctactcgagaggctgaggcaggagaatcttttgaacctgggaggctcaggttgcagtgagctgagattgcaccactgcactccagcctgggtggcaaaaaaaaacaaacaaaaaaaaacaaacaggaatttgtggggaaaaaaaatagtgaaaatcaaatttctttctctccattgtgaactgtttcgggattcttgacagaggcatgccacctttgagggcaccaatgtcatcttttcgactccatctttcattctaatctccttctaccccggctgattgacaatgctgccactgatccctgcttgatccaccctggccattaactcaaatgagccttttgagagatgtaatttggcttaattgatttaacaagctgggtggcataa

SEQ ID NO: 93631 - DNA, 18114 bp, Homo sapiens
ccggcatgagccaccatgcctggccagactaggtattttgacttctgtgttcctggcatctggctccagccgtctgaattgtgtacttcatggcttcagccttcaggcaaaggtcctcatatatgttttgacctccaggtcaaaatgtgggtacagctcctgattcccaggatagaagatggaaacaactttggggtgtccattcaggtaatgtacttgaattacatactgggaagagtggcttgggagatactctcatctcccctgcgttacctttttttcctttttctttggggctgctgtggatgacatggaagtggcttttgatgcacctgttgtttgtttgttttaggaggaaacagttgcagagctaagaactgttgagagtgaagctgcatcttatctggaccagatttctaggtagggctgcttgggcttggccgaggcgttgggggctgatgaggtggtgggcaccatcaagggtctcctgcatcttcctcctcttctctctctttccagatattatattacaagagccaaattggtttctaaaatagctaaatatccccatgtggtaagtaaggggtttgtggcctgagggtggaggtggcaggatagtgaagagtgactgttactgggaaggagctgtctggaaacaattgggctttggggactagctttttcctgtaccctccttgcaggaggactatcgccgcaccgtgacagagattgatgagaaagaatatatcagccttcggctcatcatatcagagctgaggaatcaatatgtgagtaatctcagtccttgtccatagttgctgtggcttctcttagttctgttgagagtattgttaaaattctctgaagggctgagatgagggtctgaggtaaaatgaatagaccaaattctattcatcacctgagtgttgagaaccatgaagtcatctagcagggtatctctcttttttctacctgagtggaggggtgtgcagtacaatatggttaagatataggtgtcagagtcagacagacttaggtttgcaaccaggctctacctgtgttgtgtgacctcgagcaaattgttcaagcttaaacttcaatttcttctttaaaatgggactgggctgggcgcagtggctaatgcctgtaatcccaccactttgggaggccaagccgggtggatcacctgaggtcaggagttcgagaccagcctgatcaacatggcgaaagctcgtctctactaaaaatacaaaattagccgggcctggtggcacatgtctgtaatcccagctacttgggaggctgaggcaggagaatcacttgaacccgggagttggaggttgcggtgagccaagattgctccattgcactccagcctgggcaacaagagcgaaactccatctcaaaaaaaaaataaaaataggctgtaatcccagcactttgggaggccaaggtgggtggatcacttgaggtcaggagttcgagaccagccttaccaacatggaaaaaccccatctttactaaaaaaaaaaaaaaaaaatttagccgggcgtggcggcacatgcctttaatcgtagctactgaggaggctgaggcgggagaattgcttgaacccgggaggcggaggttgcagtgagccgagattgcgccactggactccagcctgggcaacaagagcgaaactccgcctcaaataaaaataaataaaataaaataaaatgggactgaagaggccgggtgtggtggatcacacctgtaatgccagcactgtgggaggctgaggcaggtggatcacatgaggtcaggagtttttgaccagcctggccaacatggtgaaaccccatctctactgaaaatacaaaaaattagctgggcatggttggcggacccctgtaatcccacctaatcgggaggctgaggcaggagaatcgcttgaacccaagaggtgtaggttgcagtgagccgagatcgtgccactgtactccagcctgggcaacaagagcaaaactccgtctcaaaaaaagaaaacaaaactgaagagtacctactgcacaaaattcattcgcttttttaaaataagtgagataacacattgaaggacctggtacaattcttactatgttaagtgcacaatacatgttagttgttattagacacttggggccttggaaatacccatttatacccagttgaagtataagagaggtggtgctgccaccctgaatgcaggctcaagtgagattaaaattacagtaagttggccgggtgcagtggctcacgcctgtaaccccagcgctttgggaggccgaggcgggcggatcacgaggtcaggagatcgagaccatcctggctaacatggtgaaaccccatctgtactaaaaataaaaaaaattagccgggtgtggtggcaggcgcctgtagtcccagctactcaggtggctgaggcaggagaatggcatgaacctgggaggcggaggttgcagtcagccgagatcgcgccattgcactccagcctgagcgatagagcaagaccgtgtctcaaaaaaaaaaaaaaaaaaaaatacagtaagtcttcacttaatgttgtccataggttcttagaaactgcgactttaaaaatgatgtatatcaaaaccaagtttttttttcattaacattgtaacaaaatgacatcgaacaaaatgatgttatttgaaaccaggttatttgaggaccttctgtacttgatttgcttacctgctgtactttaatttccttcaagtcgcagttgctaagaacctattgatgacattaaggacttaccgtatgcagatgattgcttggggatttgtgaaggggtctctcattttcttgatgaggtaagggttgtacagatatgtgattcccctgatccctcttctctcaggtcactctacatgacatgatcctgaaaaatatcgagaagatcaaacggccccggagcagcaatgcagagactctgtactgaggccagggccagggccaggggactctgtgagtctggctcaagaccgacattgccttggtttgttacatgactatcgtgatggggaaactggctggaaatagtaatcacacctctctgtttttagttagagtctaatgaaactctcatctagttctgtgatgtgtttacctcttttttcaggcctcaggaactcttctatttccttccctaataccccacacccaacctgtcgtaatttctggagaactccaggtttgtgtgtgcaggatgttggcacaaaaatacctgtgttttcattctccccctctctccctcctgtgtcttgcgctttatgttttcttccgtttgataattagttggttaaaagctgagggaaccggaaggaaagtgctaggtgttttttaggaactagggtggcggggggacgaacttctcttcctcacatgaggttactgtttctttcctctgtggggcattggatcctcccacagttgccctggtgatgacttagggcttcccatctgtgtacatcccactttgaatcttgatcgtgacaagaaataccttaggccttcagtcaattccgaagctccttcagttgtttttataatgggcgttttcacatgcacatatgtgtatgcatgtatacgcccatacagacatgcacacacagactcctactccattagctaacataccctccctctccacaacccctgtcacatacctttcaggaggtgacagttgtcttagttgtcatctacccagacaaacgtcctgggcccgtcctccctcctgatactgtagcctcttggtacccagggtgagttggtggagaacagagagatgagaagcagagggcttggggaaagcctgttcctctctgactcagccctttttggcattattgcaagagcttgactcctggttgccttttcccagccagttttcagttggggtgaaggtttctgcaagtgtgaggtccagatgctgctgctcatgttgggctttccttttgggaactatttctctttatttatagtgtcgggcttccggggaaagcaatcattggtgtgtatgtgtatgtgcatgcacacacgtgcatatacacatttgtgtatgtggaaatgtgctgggcaagtcaaaactatagaagagttgcctcctgtctctcgaatcttccagagatatcacttaattgttaacagcttttgtgttaatccccttcagcccctagctcttttattctaccacggctggagagttgatacctgcagtcagcctgccagtgactcttagtgtctgtttctgacttatttttcctgtctctgtcttccaacccccaataatatttccaccggggatgcatcatttttactcccaatattctgtagagagggagtcaggatgctgtcttcccacgaatagtactcagtaacaaaccaattgcattttagttgggcagtgctcccacccaccctccagatcccttccagctaaaacccttcccccttccctccatgtgtttctcagtttcccgtttcgtttgttggactgttccactgcccctcctcctcaccctatcacccatggatcgtaatgtaaaattcttttaccatgtcaagaaattattaaaaatacaggtactttgacctctttctaaagccgcagaccctggtgcaatgctctggtggctagggatgtactcatgctcatatgtgtgcacgcttggacacccacctccatggacacctagccaccctgttgtgtgtccttatgccagttgagctgaatcttttccccagtatagtggaaagactgaggcttctgcctactgagcaaggttgggtgcttcatttgtgttcagtctgaattatgggaaagttagctcttcccagacctaagctgccttctctccctactttcagaagatcctagttccttccttcccgagtgatacccatgaactgccagtagaggctgctatcgttccatgtgtaaggaatgaactggttcaaggcgcgtcctacccagtcattttctttaccttatactaattcttcctgaataatgtcttcagtttcttgaggagactcctagttttggttttcaaattacttggagggctgcctaggaatctatctccctctgaaataaagtttcctcatcttccaccttgcaagtagccttctggtttccaatgatcccctcgttgtctctgtaaaaagagtttaaggtcttgaacaatggaggagcagctgctctgttctgtttcagagatgactaccaaaagctagcggtttgtgagtgcctcccctgtgccaggctgttaagtacctaatgtgcatgatcacatttaatcttcaggaatctataggatagttgtatctatttgttacagatgaggacactgagactcaggataagtatttccgctaaggttacacagctgagggaactgggattggtggacaaacctgattactaagcccaggccctcagccactccactggttggaaatggcctgactacaaatcaagggcttggcattaggcaacaagtagaattcagtgcttactgctgaacatggcagtgaatcctggagctgttgggatgcagttcctgccaggaggtaggaaaatggacagcttagtgcttgcatgcaggctgcagaacttaattgggcatctgaggtttgtactcttcctgagacccattccaggtggaaactggaggttagcatcgttaacccagattccctttcatctggtctaaatgatggaaatcagtagttggtactgactgctaccagtgggagttcaggggcaaggaagaggctatgcatgtggaagcagtgccctgggccaaaccacaggacagaaaattggaacagaattacataaatcaaggtcagaaatttcctgcccaacccatggggtggagttttctcccttcctatccatcctagcgaatataaaccccgacttgatgtcagtaactggaaggagcagctgttagaaytctgatttcagctctcagcatccaccatgcatctcaagatagtcctggcgttcctggcactgtccctcattaccatctttgccctggcctatgttttgctgaccagcccaggtggttccagccagcctccccactgcccctctgtatcccatagggcccagccctggccacaccctggccagagccagctgtttgcagacctgagccgagaggagttgacagctgtgatgcgctttctgacccagcggctggggccagggctggtggacgcagcccaggctcagccctcggacaactgcatcttctcagtggagctgcagctgccccccaaggctrcagccctggcccacctggacagggggagccccccacctgcccgggaggcactggccatcgtcctctttggtggacaaccccaacccaatgtgagtgagctggtggtggggccgctgcctcacccctcgtacatgcgggatgtgactgtggagcgtcacggcgggcccctgccctatcaccgtcgcccggtgctgagagctgagtttacacagatgtggaggcatctgaaagaggtggagctacccaaggcacccatcttcctgtcgtccaccttcaactacaatggctctaccctggcagctgtgcatgccacccctcggggcttgcgctcaggggaccgagctacctggatggccctctaccataacatctcaggggttggtcttttccttcaccccgtggggctggagctactactggaccacagggccctggaccctgcccactggactgtccagcaggtcttctaccttgggcactactatgcagacttgggccagttggaacgggagtttaagtctggccggttggaagtggttagagtccctctacctccaccaaatggagcttcatccctgaggtctcggaactctccaggtcctcttccccctcttcagttctcgccccagggttcccagtacagtgtgcaaggaaacctggtggtatcctccctctggtcatttacctttggccatggggtgttcagcggcctgaggatttttgatgttcggttccagggtgagcgaatagcctatgaagtcagtgtccaggagtgtgtatctatctatggtgccgattcacccaagacgatgctgactcgctatttggatagcagctttggactcggccgtaacagccgaggcttggtgcggggagtggactgcccctatcaagccacgatggtggacatccatatattagtgggcaaaggggcagtccagctgcttccaggggctgtgtgtgtatttgaggaagcccagggaytgccccttcgaaggcaccacaattaccttcaaaatcatttctatggtggtttggccagctcagcccttgtggtcaggtctgtgtcatctgtgggcaactatgactacatttgggactttgtgttgtacccaaatggggcacttgaagggcgggtccatgccacgggttatatcaacacagctttcctgaaagggggagaggagggcctcctctttgggaaccgtgtgggggaaagagtgctgggaacggtgcacacacatgccttccacttcaagctggacctggatgtggcaggtgagtgctgaggggatgaggatggagacttgggggcggggtcaggtggggtggagggaagggaagggaatctcccaggtcaagctgaaataacaagtggcaagagcagggtgttccaacaccacagctctagtggcaacagggcagggactgtttgagcatattcagtgcagtgagtctggtactgggctactgggtatctggtaaaaggtgaaaagagttcccccgcccagcccctctgacttgctatgattgtgaaactagtttaaatgtaatggctgggcatgattgccttagcctcaagtgacactgggtgggtgaactggcccartggggctggagttggagcactttgcttcttcctaattctgagggtcagtaggggtggggagggcagggtcctgagccgaggtcggaagaagtctgtccagagtctwmagggtgggggtcgacctggggcttaggaaggagagggtagcaaagctggggttgctccccaggatagggccactcctcatcgggagggccatcccattcctgtcatcacagttgactcatggcaggcacacagcttgctgcaagtatggaaagagatttctcaagcacaaagggctcaaagcacacagaggacttgctgttcctgacagactttgtcaaggacagaaaggaacttacagactcacacactgatccacaaagaaaattagaaactcaccagaccctctccattttaagggaaactaaggagggtggcgggagatgggacaggaaatgactgcccaagtataatgcaacataaactagtatttcttgtgaaatgttttcttatcctcaagtctaaagacatggcacgtgcgtgcctgcgtgtgtctctgtgcatgcacttgcacttgtgttcgcagtggtgtggagggtaggaaggactaatagcatgattgaaatgatcatattaactagattactctttgacatacttggattttgacttgtcttctgattggaagtttttcttcagcatctttggcattaaagaggcttgttttgggaagtaacatttattggacccctagcgtgtgcagcatgggctgctgctgtgggccagagaggctgtgtcaggcaccagctcacaggatggctgcagaggcaccagcttcagtgcagtgcctcccgtgccaggtaccttcatataggtctcgttgaacttacagtccagacctgcagaaagtgtatgaccaagtgctgagttaggcagtgcaggttatggatgctgtagaattccaaggaactcccagacaaaggtatgaatgtgcttgcttctgaaaaacactgacagtacttcccaccttgctgagatcaaaagtgaagtctcagagctgggaggagtatgcaggggaccatgggaagggattgggttttctttttttgaggcagtgtctcactgtcacccaggctggagtgcagcggtgcaatcacaggttactgcagccctgacctcctgggctcaagcaatcctcctgcctcagcctccttagtagctgggatgacaggcatacactaccacgcccagctttttttttttttttgaagacagagtctcactctgttgcccaggctggagcmcggtggtgcaatctcagttcaccgcaacctccacctcccaggttcaagcgattcttgtgtctcggcctccagagtagcacaccaccacacctggctaatttttttaaattatttatttatttaagtagagatggggtttcaccatgttggccaggctcatcttgaactcccggtctcaagtgatccactcgcctcggcttcccaaagtgctgtgagctaccatgcccggccttttttttttttttttttttttttttaagaggcagtgtttcattccgttaccccagctggtgtccagcacctgggttcaagggatctgcatcaccctgccaccagcctcctgagttgcaagctgccacacccggctcaggagtcagtttttcagctagcttctccaagacaaatatcattatccctttcatagttaaaagaatgtcactagtcagctgcaagtgcttttctgtttattgggcacagccatagaacagctttaattatgcccagtgtagggattcagaaagtgaatcagagaagcaaattggtccagggactgtttggtagtccagtgctaatagaactttctgtagtgatagaaatattccgtatttgagctgtggctctaaacaatagtcactagccatgtgtggcaactgggcacttcaagtgtggctagtgtgacagaggaactgaatatatatatatatatatatacatatatatatatatatatattttagacagagtcttgctctgttgcccaggctagagtgcagtggtgtgacctcagctcattgcagccacaacctactgggctcaagcaatcctcctaccccagcttcccaagtaactgggaccacaggcatgtaccaccatgcctggctgatttttttattgtttgtagagtcagggtttcaccacgttgcacaggctggtctcaaactcctgggctcacatgatccacccgcctcagcctcccaaagtgctgggattgcaggtgtgagccacctcagctggccctaagttttaattttcatagccacgtgtggctagtggttaccctatcggatagggcaagttggaagaagataggagcttgctcttgcccagacctcctggctcccagcacagtgtgctctgatgctctctctgccttttgtcacaccagtgcagtggacatcatggggaagacagggacctggcccagagaccttacctggtgtggaactcatctcctttccctccccctggcagggctgaaaaactgggtggtagctgaagacgtggtgtttaaacctgtggctgccccctggaacccggagcactggctacagcgcccacagctgactcggcaggtcctgggaaaggaggacctgacagctttttccttgggaagccccctaccccgctacctctacctggctagcaaccagactaatgcgtggggtcaccagcgcgggtaccgaatccagatccacagcccccttggcatacacatacccctggagagtgacatggagagggccctcagctgggggaggtgaggagggccctggcctgggtggaaggaaaggacagcccctcccctgccccagtccttggagacaaactcccttcccacggctaccattcatccctgtacctcccctcaaacccaagttagatacacggtgggaaatggtctcacacagaatcggatctaagggactcctgggccagtaaaggcacttgacatttcccaaaaccaccttcttatgattcctggccagataccagcttgtggtgacccagagaaaggaggaggagtcacagagcagtagcatctatcaccagaatgacatctggacacccacagttacctttgctgacttcatcaacaatgaaaccctcttaggagaggttggttgccctagggacataggaaagggacacctgtgggcatggcatcttggctgcccagcctctggccaaaggttagagggaatggctgatttccagttcgcagattcagaggccatggagttttctgatgaccaacacaggtcatccctcctggggtgagattagctctgggacactggctcccccctctccccgcacagctgcttacatggattgctccacgtgttgtatgggcatgaggctggggagagtggaagccaggctgagactggaggctgggattgtgactgaagggtggttctttgggtcacgcttccatagtcctccagctcctccttcttcttgcaggatctggtggcttgggtcacagccagcttcctgcacattccccatgccgaggacatcccaaacacrgtgaytctggggaacagagttggcttcttgctccgaccctataacttctttgatgaggacccctccatcttctcccctggcagtgtctactttgagaagggccaggatgctgggctctgcagcatcaatcctgtggcctgcctccccgacctggcagcctgtgtcccggacttaccccctttctcttaccacggcttctagtcctgagggtgtggcgggcggcgtggttaggcacatgtacttttccctgtttctactttctattctccgtgtttttatcacacctgctccccagattcccaccccctcaatgttcctctcacacgaaacccccatcagtccctttggttaattcttacttcctgttcatctctaaagtgttaaattataaaaatgatttttaaatattcaaagaaaaatatcacaaatcctactactcagaaataggtggtcacattacatcagacatctctttatgcatgtgcattcaaaaggaagagtagatagaattttgtaaaacagatgttgtatgtaatttataataaaaagtattagaggaattttacttgaatttattgtttgacctgttaagtatctagagtcctctggagaatactaaggagtctggccagggaaattagcgctgggggccagagggcaagggggatagacctggccaaggaatgtcatttggaaagctaaaggggcagggggtgggggtctttggaaggaaaacgatagtttgaagttacaggaaaatatctggccctgactaagtgggggactggggaagaagctgggctgaggtcaggagaggctgctctgcacagatcctgctccttcccagtgctgcattatcttgaaattttccttccccttccccctagccccaactctccccaactccaaccctgacccagaaagtagagtgatttggaggctggaagacaaaaccatgtaaggtctgtggaaatcacagctgttcagacccgcctccaaccccggccaccccgcccccttgccctagccttcctgtgtccttcccacccttagtcccaggcatctgactaccgggaacctcagccagagtccgggagccccccaccccgtccaggagccaacagagcccccgtcttgctggcgtgagaatacattgctctcctttggttgaatcagctgtccctcttcgtgggaaaatgaaccagaagacaatcctcgtgctcctcattctggccgtcatcaccatctttgccttggtttgtgtcctgctggtgggcaggggtggagatgggggtgaacccagccagcttccccattgcccctctgtatctcccagtgcccagccttggacacaccctggccagagccagctgtttgcagacctgagccgagaggagctgacggctgtgatgcgctttctgacccagcggctggggccagggctggtggatgcagcccaggcccggccctcggacaactgtgtcttctcagtggagttgcagctgcctcccaaggctgcagccctggctcacttggacagggggagccccccacctgcccgggaggcactggccatcgtcttctttggcaggcaaccccagcccaacgtgagtgagctggtggtggggccactgcctcacccctcctacatgcgggacgtgactgtggagcgtcatggaggccccctgccctatcaccgacgccccatgttgttccaagagtacctggacatagaccagatgatcttcgacagagagctgccccaggcttctgggcttctccatcactgttgcttctacaagcgccggggacggaacctggtgacaatgaccacggctccccgtggtctgcaatcaggggaccgggccacctagtttggcctctactacaacatctcgggcgctgggttcttcctgcaccacgtgggcttggagctgctagtgaaccacaaggcccttgaccctgcccgctggactatccagaaggtgttctatcaaggccgctactacgacagcctggcccagctggaggcccagtttgaggccggcctggtgaatgtggtgctgatcccagacaatggcacaggtgggtcctggtccctgaagtcccctgtgcccccgggtccagctccccctctacagttctatccccaaggcccccgcttcagtgtccagggaagtcgagtggcctcctcactgtggactttctcctttggcctcggagcattcagtggcccaaggatctttgacgttcgcttccaaggagaaagactagtttatgagataagcctccaagaggccttggccatctatggtggaaattccccagcagcaatgacgacccgctatgtggatggaggctttggcatgggcaagtacaccacgcccctgacccgtggggtggactgccccwacttggccacctacgtggactggcacttccttttggagtcccaggcccccaagacaatacgtgatgccttttgtgtgtttgaacagaaccagggcctccccctgcggcgacaccactcagatctctactcgcactactttgggggtcttgcggaaacggtgctggtcgtcagatctatgtccaccttgctcaactatgactatgtgtgggatacggtcttccaccccagtggggccatagaaatacgattctatgccacgggctacatcagctcggcattcctctttggtgctactgggaagtacgggaaccaagtgtcagagcacaccctgggcacggtccacacccacagcgcccacttcaaggtggatctggatgtagcaggtaagacattttggtggggagaaggcttctggaagaagggctgaaaagttgtttccattagctttgggttttatgtagattatcccagaaaggaagacgtggatttttgtacttccccttttgctggatgggagagagttggctgctgagttttatttggatcttagctcactggctgggtgcaaagctgcagccttcctctacgtgacctcatccaaagatcttgggaaatggccgagctcagggaggaggcaggatttgggctaacagtgtccccattgccctcttctctcccttgtacttatatgggctctgctgctgggagcagccttctgtttgtcagctcagttctgtgtctggcctgtggtggtggtgttttggaggatctctttgcattctaccacgtccctggcatgtgcaggtcagtcattccaggttgtacatttcctttggagatggaccctcctccctgattttccttctttctctgggcacaattcacctaagtgtgaggggtcacatggatcccgtggagcattctggatagatcctggagtctggtcacagagagagccaaggctacatgatggcttggagtcttcatctttgtcttttcactgtctttccccacattgagtcagtcaccaggtgtttttttttggttttgttttattttgttttgtttctgttttgcacctgcagtatctcggcaggtcagactgtcatgccgtgcaggtgccagccctctctctgctgtttttgctcttgttgctctcagagccaagagccactctgcacccagagggcctcccatccacaccagcctgccctttactcagctctcactttcgtcatcacctgtgggatcctgtctgcagaaccccctcaaaactctttccttcacggtgcagctccaccctgccttgctgtgctctgcacagctacacccaaattctccatgtccctggacacgcacttcacatgttacagtcaggcatcctcctgtttgcttatgctttgtctctgcttagaatgtccttccatatcatcttttctggtaatgtcctttaaggccaggctgaaaagttgcccggaagggcccccttttcctgcctgcaactgtattcctgtgatccggaagttgcctaggccatgctcctctcacaggacaggccagtcagtggtttgtctgtctgcgtggaaagcaagagggtaaggatgatcattcatctctatccccagggacgagtacagtcctctctgctaatgaatgttgaaagaatgaatgagtgaaatggaatgaactccctgatgaagtattttaatttacaggtcaacagctttggctaaaggattggaggtatcctggggagagggaagagaaggaggggcacactcagttctgggctgctctttggcccccactctgaagccagatgggggcagagtccagaggggccagggcagttgcctgacaggccctcccctatcccaccctgagcaggactggagaactgggtctgggccgaggatatggtctttgtccccatggctgtgccctggagccctgagcaccagctgcagaggctgcaggtgacccggaagctgctggagatggaggagcaggccgccttcctcgtgggaagcgccacccctcgctacctgtacctggccagcaaccacagcaacaagtggggtcacccccggggctaccgcatccagatgctcagctttgctggagagccgctgccccaaaacagctccatggcgagaggcttcagctgggagaggtgagtggcgggcagtcagagaggaggggggcagtgagagtgggaaaggagtgttggcggacactcagctcacactgtaggtgaggggagagctctctcaggaaggcttttcttttccttttttttttttttttttgagatggagttttgctctgttgcccaggccggagtgcagtggagcaatctcactgcatcctccgcctcccagtttcaagcgattctcctgcctcagcctccccagtagctgggattacaggtgcacgccaccacacatggctaatttttgtatttttagtagagatagggtttcaccatgttggccaggctggtctcgaactcctgacctcatgatccaccctccttggtctcccaaagtgctgtgattacaggcatgagccacaatgcctggccaaaggtttttctagttatccaaagaaaccatgatgggcacattttccccttggaggctaaagcccaggagtgagaactctcttctgttttggatgggagaggggttgtactgttaaatggctggggataaacaggaggacttgaccccccttagggtgacgtcggggattctgtagcgccgagtcagttgtgtgactgcaattggggaagctgagctctgagcactcagttccctttcatcataatcaggcagcaggatggggtyaatggccatggaggcctgaccagtgcctccctaggtaccagctggctgtgacccagcggaaggaggaggagcccagtagcagcagcgttttcaatcagaatgacccttgggcccccactgtggatttcagtgacttcatcaacaatgagaccattgctggaaaggtcagctggccggggtagagggtacaggatgagccttgctttctcttgggagggtccctgaaaaccacctgcacttctcaggggtggtgctgattcctgccttctgcacttcagtatatctgatcattatcctttgagggaaccttcctgagctgggtgtccatatgcagacactgagtgaggccctgggcctgtccttgagatcttagagccctcttagttccagtttcatggactgagtcctttccaggctccaggactcaggagggatggaagttaccaggsaaaatgacatctcctgtatctgaagcttctcccattcctgacttgatgaatttcacaatgttggcctggttctgcttcccaagcgctggttctttttcctccacccttctttcctcagttgtggggaactcttggagagttaggggaagaggagctgaagtagcctgtgggtgtcaccctctgggggtagataggcaatgggcgatatgatgggaaatgtcagagatggaggctgcaagccagggacagggaagcaggtgttcctaatatgaaatggactacttatgctttgactcctacccagcaggaaaaaatgtttaaagactcatgatccttgggctggtgagctgaatccctaccagggcatgtcctcagcaaagccagacctcgtgatcctctttcttctcccctgctaggatttggtggcctgggtgacagctggttttctgcatatcccacatgcagaggacattcctaacacagtgactgtggggaacrgcgtgggcttcttcctccgaccctataacttctttgacgaagacccctccttctactctgccgactccatctacttccgaggggaccaggatgctggggcctgcgaggtcaaccccctagcttgcctgccccaggctgctgcctgtgcccccgacctccctgccttctcccacgggggcttctctcacaactaggcggtcctgggatggggcatgtggccaagggctccagggccagggtgtgagggatggggagcagctgggcactgggccggcagcctggttccctctttcctgtgccaggactctctttcttccactaccctccctcgcatccgcctctgagccagg

SEQ ID NO: 93632 - DNA, 20435 bp, Homo sapiens
cctgcttggccagcacagtgccctggaaaaggaaggagtgcatgggagaaagttataggtcttagcctgcagcttagaaaggggcatggaggctgtgggctggggttgaatgtcaaggctgggggcagtcaagggatcaggtcagaggtcacagaccagaacaaaggatgagccaggtaaggtgttttcaaatcagagactgaaggggcagaggtgacaggtctaggctgggatgaggtcagacgtcaagggtcccacctgctcatgtgtaacagggataagcctctgcttggacagctccctcagtgtggccaggtcagtccgcatgtccagtttacagccaaccagcacaaccttggcattggggcagaactcttgagtctctccttgccactatgtaggagaagaaaagagaattgtggaggggtggagggaggcacagcgtgagcctttgtgccatgccagcagtgtgccctctcttcctcaagcacgcagaaaccatgtatccctcaggactctcccacatgaggaaggaggtgagaatgctaggcttggtttgagagcaggatggggtgagagagaagcagcggggaggagagggctggcgtgggcctgtggactcttctccctcagtggctatgaagggtctgccagcctggaaacttcccattcccactcgcctttcccatactctctcctgggaacaaatttatcccaccctcccctcccccacctgggaactggggctgccctagctgacttctgtccattcacccctggcttttgtcatggaaactggggcctggagaggaggccacagggctttcctgagctccaggatcaggcttcccatcccatcccctccatctgggactcccactgccaaggagttggaagagcagagaaggaatcctgtgagtgcttctcccttcactcccccacctcccctagctgctgtatccagctctgaggactttcaggaaaggggtggctgggagggatgggggctggaggcaggggtggcagggatgagagcttcactcgctaaccagctgatggccataccccagccatcactccctcctcctggcccatgttatgtcaggaccatggtggtctggtccccctcagtctagctgccctatttccccaggctcccaccttcttgagaacactgtccagtgtttctggtcggctaatgtcgaagcagatgagcacagcatcagaatcaggataggccagaggccggacattatcatagtaagaggaacctgaaggaagacagggcatgaggggcctgagtggatgggaggcctggaagggaatgggagaccttacagatcctggtcaagggatgctgggagcagagaatggaaaagagcaaccattaatacccatcattaatacccatcatggagtctgggtttcccaagtgggggagcgggcagaagggaggtcacatggtgggaaacggctctctgcttccctagtggtttaaaaagtaataatttttattcttgactgaggtttggacccctttgagaagctcataaaatctatagacattctcataaaatgttgcatgtgctttctgggctttggcagtctaaagccctgaagggaactcttgtaaaaataaaaaccctccttatgttgggaggaggaaaagagcagtggcagggagagcactctcccattctcctgggacttgacctcagatttatctagttcaatggagagaaacagcctcctgaccacccctcactcaagacattctaaatgtcttttctgcttttttattttttgagatggagtctcgctctatcgctcaggctggagtgcagcggcatgatctcggctcactgcagcctccgcctcccaggttccagcgattctcttgcctcagcctcctggtagctgagattacaggcacgtgccacacgcccgattaatttttgtatttttagtagagacggagtttcaaccatgttggccaggctggtctcaaactcctgacctcaggtgatccccccaccccagcctcccaaagtgctaggattacaggcgtgagccaccgtgcctggcctctaaatgtcttttctaaacccagtcttatctctgaaggaacatgttccaaattaaaagccaytccttcccaactttcccaggtaggcaggacccagctgaggggctcagatcctaggctttctccttcaggacatggtttctgtcaggctctgcaagttctacctcagtttccctggattttagcagaatattgatttttcccttcctgttggaattggatggatgggctgggcttacctggaacctaagggtctaaccaagggaggggacagagtgggccgccttggaagtcagggtgacccccagggacttggctacctgaagtgtcccacatgttgagctcaatgcggcgcttgtcgatctcaaagctcgcagtgtagttctcaaacacggtggggacataactctgcagacacggatggatccagatgagatcatctctccaagtcctcaccccagataaatgccctcctcactcccacaccccgtccagcccagcccctggacacaagttggtctgggattgggcaaaggggagatcccgggagctcctgcccccccccccccccccccggagaatctctgctaagctccaagacctcctcctgttcccttctggtcccttcagccccctagttcttcccctctccattgcccaggacctccgacattcccctcgccctccctcccggatgctctggttctcccaaaccccatctatctcaccctgctccctaattcctcccaccccaatcctctgcagtccttcctgagccctcaaggcctccccgcgtcctccgaccccctgtctcttgtccctggttacccgagtacccattcccatccgtcgccagggcccctgtcacccaccccccagcagccttagcgtccccctcccaagacgcaggtccctcaccccgggataggcgtccttggcgaacacctgcagcagcgccgtcttgccgcactctgcgtctcccaccaccacgatcttgcagcggccgctctgcccctccatggtcccggctacgagccggtcccccacgccacccctctcccggtcccctccttcgcctctcccgcccctgcaactgcagccgctcgggccgccaacaccggcatctcccgggcccgcgccgagcccccgccccgggtccgcggccccccctccgccccgcccccagccagcgccgcgccccccggccctcctcccacccccgcagccggggtcggggccagaagatctggcggagccctgggaacagaggcctcagagccggggtccagcccgccggtgtggtctgaggggcccctgccggtttgggacaggccgaactgggcttatttgactttctcggatataagggcaggtcagagttcaagcgaagttcttaggggtagaatatgagcggcacaagcgcgaagctcgggcctgctgtgtacccacgcgtgcacgcaggtgtaccagtgcggacaagagctggggcagccatccacttcctgaacacggcgggagagagatgctaaggggaaggagggagcctctttggttttctctcccgcgtccgcctatgtcctggcagggggtcttggggaaatgggagggtgaaccccagcacacccacccggacggtggtgacatcatagctttccgtccccatggcaacgggcagccgggtctccggttacattgacttaaccgccggcctagactagcagagaagcgtggactgagttcctccagccaagcactgggtggaaagttttgggggagctgcgtcctctggtggatgcttggggacaaggagataaggaagagaaagaaccaaccgccagagttgctctgctggagccagagctaaacccaaaagtcaggcttgattaagagtctgacaataggccgggcgcggtggctcacgcctgtaataccagcactttgggaggccgaggcgggcggatcaagaggtcaggagatcgagactatcatcctggctaacacggtgaaacccgcacggtgggcgcctgtaatcccagctactcaggaggctgaggcaggagaatggcgtgaacccgggaggtggaggtggcagtgagccgagattgcctcactgcactccagcttgtgcaatagagtttcgaaaaaaaaaaagtgcttttttatatcgaggcaattcgagtcaataatatatgctgcaaataattctgtaaagataactagaagctgggcgcggtggctcacgcctgtaaactcagcactttgggaggccaaggcttgcttgcgtgcaggagtttgaggccatcctgggcaacattagcgagaccctctctctagaaaaaaaaatcaaaacttagctaggtttggccactctaggcacgctgcctatggggtagccctgctctgcaaagagcagtaaaacataaagttagccgggcgtggtgacacatgcctgtggtcccagctattcaggaggctgaggtgggaggattgcttgaagccgggagtttgaggctgtagggagctgtgatcgccccacctcgctcagcctgggtgacagagtgagaccctgtatcaaaaaaataaaaatataaatataactagagcacgcagcatcatcactatgttacagaagggaaaatgaggaacagaacgttaacaccaaagtcagaaagttttaaaggcttggtctccatgcttctactttgccactgcaagaccacagtgaattaagtctcatccctgcctgggttagatgtcagagcctgagacacaatgtagttggactccagtccacaggtggctgactccaaatctgatatgagttaactccaaatctgatgtaagttcaagttttgggactgttccttaactttttttttttttttttgagacggagtctcgctctgtagcccaggctggagtgcagtggcgcgatctcgactcactgcaagctctgcctcctgggttcatgccattctcctgcctcagcctcccaggtagctgggactacaggcgcctgccaccacgcctggctaattttttgtattttttagtagagacggggtttcaccgtgttagccaggtgaatctcctgacctcgtaatctgcccgcctcggcctcccaaagtgctgggattacaggcgtgagacaccgcgcccggcctttttttttttcgagatggagtctccctctgtagcccaggctggagtgcagcggcatgatcttggctaactgcaacctccgcctcctgggttcaagcaattctccagcctccgcctccctagtagctgggactataggcacctgccaccatgcctggctaatttttgtagttttagtagagctggggtttcaccatactggtcaggctggtctcgaattcctgacctcaggtgatccacccacccgcctcggcctcccaaagtgttgggattacaggcgtgagccacgccgcccggccctttttttttttttttttaacagggtctcactctgttgcccagactggagtgtagtggcgcgatctcggctcacctccgcctcccaggctcaagcgattcctctgcctcagcctcccaagtagctgagattacaggcgcgcgccactaccgcccggctaacttttttatttttagtaaagacgggggtttcaccatgttggccaggctggtcttgaactcctgacctcaaatgatccaccagcctcggcctcccaaagtgctgggattacaggcgtgagccaccgcgccaggcctatcccttaaaatagtttttaatttgaataaggtttactatgaataaataaatcacagtcggcttgatcccaagagcacagacgttcctggtgccccttttcgtgctctcccagcttgcgccactatggccctggccctttaaggctgagcgcgaggccccgcctcgcccggcgccccgcccctcccgctggatcccgcagccgcggctcttcccgacgcgttccgccttccccagctgtgcactctccatccagctgtgcgctctcgtcgggagkcccagccatgtccgacgagagagaggtagccgaggcagcgaccggggaagacgcctcttcgccgcctccgaaaaccgaggcagcgagcgacccccagcatcccgcggcctccgaaggggccgccgccgccgccgcctcrccgccactgctgcgctgcctagtgctcaccggctttggaggctacgacaaggtgaagctgcagagccggccggcagcgsccccggcccctgggcccggccagctgacgctgcgtctgcgggcctgcgggctcaacttcgcagacctcatggctaggcaggggctgtacgaccgtctcccgcckctgcctgtcactccgggcatggagggcgcgggtgttgtgatcgcagtgggcgagggagtcagcgaccgcaaggtgagcgggttgcgtagggcagggcagggctgcgcaggccactgggcagtggggcacgagtgggcgagcgccgggggtgtggcagggcgggagaaactggcgcggacctgggtgcacgagcgtggaaagcgtagccaaggaacttgtgtttgggggctcctggagagcggcatttatgtggggaggggagacgaaattatcgccccttccccaaccattttwagttgtggccgccgcccagaagctgtgctggtgggggggaaaacaataaggtgcccatgcgcatgcgcacaaccacactaccgtccccacccaccccccccccccccattaaaaccacacctgtacccctacccaccaaacactctctgggtaattgtggtctgtgactatgagtgacggttagtgccccctttccccgagggagcttgaggggctatgtcgtcggggttgggcgggggcacagcggccgtgccagagtcctggtcacatgcagccccgtggtctgtgggggtgtgaggcggcccctcccaaagcaaggccaaagagacgagacacgcccatcacggaggagagagagcctttgctaccccaccgccaccagccttacaccgccgatctgattttggggtgggggaggcgggattgggtcatccgatctttgtcttgggctctgtgtctcccgtgactgcagtatctcctcctcctgtgactcagccctcagccatcgggccacgacccggggctgcccttgggaatgcctggggcggggagtggaaggggggacccacctctgccttcctcctgcagaggacccccacttcagaaaccccagtgccaggggtttggactggaacggagaggtgyggcgccttgaactggttggccaagtctgcaggcctgtttctccttctcatttatcattaatcttggccacaaccctggacaccagagagctcaaaatgatcagctttttgagagacctgggatgaggcctcagcacgccatttgtttagaggtttcttttttttttctttttctttttttttttttttttttttagacggagtttcgctcttgttgcccaggctggagtgcaatggcgcgatctcggctcaccgcaacctctgcctcccgggttcaagcgattctcctgcctcagcctctcgagtagctgggattacaggcatgcgccaccatgcctggctaattttgtattttagtagagatgggtttctccatgtcggtcagtctggtctcgaactcccgacctcaggtgatctgcccacctcggcctccctaagtgctggggttacagacataagccactgcgcttggccaggagtttcctttttaaatcagacccctcaatgagaggccccacagatgcagcctcttgcagacctgccagcccaattctggagccaggtttgttggattcatcctgtatgcaaacagcttctccttaaggctttcctctgaattcagctctggccccaccctcaaactgacttctaaatgatcccactcttgagcaggcgtctaagaggaatattttcgggaggtagttgtagttcatgttactgctgaaggccacccacctcacctcccctccatacactttccgcctggtaaatacaggatatcctgtccagggcaagaatctgatgtaagagcctggattctgcggggagggcccttccctctctctccctcctcctccytcctggtgtctgggttggggaggggtcatggccctgatttggatggcctgagggttagcatgagccagggtaagtgagacttgttctgggtcaaatctgggactggccatgaccctaaatgaccaatgcactcctcgcagctctcctgggttgttctgtatctgctagtcctgagtccctgggtggagggcttccgttcttgttctccagacctcatctcaggccagaacttggaaggaaagaccccagcatgccctcagttctcgtattcagtggagtgtgggggcttgaggacatgaaaaagggcgtaagtggcagtcccatcccccttccccatggaccctaactcttgttaatatacagaattcccatcattcctggcagggatcaagacagacccagattgtcccagaacagcacccacacctccctcttcatgctcttcagagagcgcagagaagtcttttctcctgacgctccctccttttccctgcccttcccttgaccccacttgctaagctggagagaaaggttctgttatctttgtcccctttccctcctgcacagaggctctcgtgggggtgggggggaagccttttactgctgcgtaggcctctgtagcccttcttgtctgttgcccctcctgcaccatctctgagtgaagatgttttctgggctcccagtgctggctcaaacacacttctcccgaggtgaccacaccctgctgtaagcgctcagagaactttgyctgcactttggtatggccctgaccacacagtgccgtcttcttttggttgtgtgacttccttgctgctattatattattattattattattgttagctaacattattaagtgcttattatgtgccagacattgtgctaaaattttttttttccatttggaaaaactgccctaattgacagataagaaaactggagctggaaaagtggagctcaaaaagattaagtaatttttatgcatccgaagtcacacagtcagtaaacagttgagaccgcttttgtaaccacagcagtttgatcttttccacaatacttcatgctgccctaactgtaagcttcttgcattcagggatcttacacaatagtgacatgtaagatctgtaagaagatgataaggatagtatctgcctcaaagaactgatgtaagggttaattaagcattatatataaagcacttgaaatcgggctcggccctcagtcagcactcagtaaaggtgagttgttattgttgttgatgatgatgttattattattattaccatgactattgctgcttctcctgctacttcatttggaagaaggtrgccttgtacctagggggaaatcagtaaatagcctgtgggtgaatgaatgagtgactgaatgatactcttctgttcttcaaggcaggagaccgggtgatggtgttgaaccggtcagggatgtggcaggaagaggtgactgtgccctcggtccagaccttcctgattcctgaggccatgacctttgaggaagctgctgccttgctcgtcaattacattacagcctacatggtcctctttgacttcggcaacctacagcctggccacagcgtcttggtacacatggctgcaggtgacaggtcccctcactttatcaccccttaccccacccagatttccttccaggccccttccctgcagcctgtctgggttgttgtcatggcaacaccaggctgccttggcctgtggctcccagaggcctctgctgtgtagttgccgtggtaacattcaggcaccaggtctagtctggtgtgctatccttagcaacgtgccctcaccccacacccccacctctctagctaccttccccaccacttctcagtcatggaaattagacacggccctaaaatgagcgtaggcaaaatgaaggtgacaggctgagtccctgggaggctagaatggagtggttggtggccagggcaactccatatcccctgcttatgggtgtcttgctgcagggggtgtgggtatggctgccgtgcagctgtgccgtacagtggagaatgtgacagtgttcggaacggcctcggccagcaagcacgaggcactgaaggagaatggggtcacacatcccatcgactatcacacgactgactacgtggatgagatcaagaagatttcccctaaaggtggggggcataatatgggagggggtagggaggcacaggacagggaggggagctccagatctgtggatcctaatgttgttcttgggttcccctactctatgacaggagtggacattgtcatggaccctctgggtgggtcagatactgccaagggctacaacctcctgaaacccatgggcaaagtcgtcacctatggtgagttagtgggccagggatggagagagcatgtgagggcaggagggagggtctaaggggtgggatatagaggccagggcttttgaatgaagaaggggtagggactcaggtgctctgtagacgatcagggttaggaatggtcctgtatgctgcattcagattgctgactcttgggtaccagctcttttcattctctgtcacaacttttcatatgagtgatagtaaattctacattcttttttttttttttttttttgagatggagtttcgctcttgtcgcccaggctggagtgcaatggcatgatctcgrtcagtgcaacctctgcctcctgggttcaagcgattctcctgcctcaccctcccgagtagctggaattacaggtgtctgccaccacgcccaactaatttttgtatttttagtagaggcggtgtttcaccatgttggccaggctggtcttgaactcctgatctcaggtgatccagccgcctcagcctcccaaagtgctgggattatagscgtgagccaccacgcctggccaaattctacattcttgtttggggattattcttgaacaaccagcctgccttctttctgtcctacctccctgagcatcttaggcagggtgcattttcatttaaaaaagtatttcatacaacaaaataagccaggcatggtggctcatgcctgtaatcccagcactttggaaggccagggcaggcagatggcttgagcctagaaattcgagaccagcctggtcaacatggtgtaaccttatctccacaaaaaatacaaaaattagccaggtgtggtggcactgtactccagcctgggcaacagagcgagaccctgactcaaacaaatgaacaaacaagcaaatacataaagattagagcaatttttttttttttgagacagartatcactctgttacccatcctggagtgcagtggcgcaacctcggctctctgcagcatccacctccctggttcaagcagttctgcctcaggctcctgagtagctggaattacaggtgcccatctccacgcctggcttttttttttttctttttcttgagacagagtctggctgtcacccaggctggagtgcagtgacacgatctcggctcactgcaacctccacctcccggattcaagcaattcttctgcctcagcctcccaagtagctgggactgcgggcgcacgccaccatacctggctaatttttgtattgttgtgggtttttttgtttgttttgttttgttttttttttttgagacggagtttcgctctttttgcccaggctgaagtgcagtggcgcgatctcggctcactgcaacctccgcctcccgggttcaagcgattctcctgcctcagacttcctgagtagctgggattacaggcatgtaccaccatgcccagctaattttgtattttcagtagagacggggtttctccatgttggtcacgctggtctcgaactcctgacgtccagtgatccgcccacctcggcctcccaaagtgctgggattataggcgtgagccaccatacccggccaacacctggctaattttcgtattttttagtagagacaaggtttcaccattttgggcaggctggtctcgaactcctgacctcaagtgatccccccaccttggcttcccagagtgctgggattatggatgtgagccatagcacccagcccctagagcaatttaaagtcagccagggttggtttgggcctggtaaccagcagtttgagaattatccaatcactccctggcactggtgtggagaattgcaaggggatcacagggaacagagagcacagatgcagacacacagggatgtgcctgggggggttcacaggctatgtcaccttgtccttcaggaatggccaacctgctgacgggccccaaacggaacctgatggccctggcccggacatggtggaatcagttcagcgtgacagctctgcagctgctgcaggccaaccgggctgtgtgtggcttccacctgggctacctggatggtgaggtggagctggtcagtggtgtggtggcccgcctcctggctctgtacaaccagggccacatcaagccccacattgactcagtctggcccttygagaaggtgaatgtgaggactttgcagggagggcttgggtaggactcatgaaggctggggtcccaaggggcagattcctggggaagaggagggctgcctgcatcacactggcycytgttggatgagggttggatagcactgggagccgcatctttccttcctccccaggtggctgatgccatgaaacagatgcaggagaagaagaatgtgggcaaggtcctcctggttccagggccagagaagsagaactagggcaagtggctgtgagaccctagagaccagcgaagggagaagttgggaagctacgttctgttggccaccagacttgcatttcagcctctgtcataatgctctgccctccctcccccgaagktctctgtggtgatgaccgctctcccctgcccctccccgcttcctgacctctgaagaggttgggaagtgaccatttggatgtctgggccctgccaaggcgacagggagggtcagagggaggccggctgcttcctgcccccaccctttccccgggcctgctgtgctgcttttgtgccaaggttagccagtcccccctgttgtgttccatgtgctttcacctstgcctcatctttcctcccgtccctgccccgccacctccccaaagaattgaaacgtcagctcaggatatggggccaatctctgtgagtccagcatgtacctgtctctccctagtgtcccttcagcctgggctgaccagtgcccgcctctgggcttgaccagttcccaatctcgtcctctgtccccaacttcttaagcacaattgggcttcttccatctccaggttttctgccattcttaaccaaggctgcctcttccaacagggcgggaatcagacctactcccctaggtcacaactctgggaaggatacagagcccccacccttcactgagttctctggatttgttctcagtgccttagcaacgaaaacctgtgcttgtgtgtgtgtggcggcggggagggaggatcctgtttcccacctccttctcctcccctgtactccccagtgccttccttgttctggtggagctggggtttctctcctccccagtcccacaacactgccaaaaatctgtgtatgtgccattgggtggggcagccccaagcctcctggggaggcagggcaaaaacaggtgccctcatcgtggtctgtgccatgtcccgtctctatggtggttgaggagaaaggcggggaagcttcctcagccttgcrgatatgtgtggcatttactagccagagctctgaaaggcagtgctgtctgtttcttgtactgggaccaaagtaaaaatccaagcacattccccttgcagttaggggaggccctactgccttctcaaagcagrgaggcagcttatcaaactcagcccaaaactctgtttacatgggtggggagatggagcagggaagtacagagtgggatggtcaggacctgggccattgcaaccaaaatggggacttcctgggtagggaggtcactccctctactcmctgagctaggattagggagggttattgccccaaccattgcaatgggaggtggagggacaggctcagcctcctcattgtytaaatgaggcctaaatgtktgaagtgcgatttytgcttttgtgtaccccaccaccccattaccacagctgcctttgtgtgtttgtgtcaataaaaagccaaaccctgrrtcctgcttgttgcctctgagagtggagggaaggtgagctcctggaaggctagtgctgccagcagaagatctgggctgcttcctgccccctgcctctttccatgcccaaatcacgtttcctttcatgagtgaaatgaggaagaacatcatggcatgcaggctctttttactgttctgggcagtgttttgcaatgtgtgacccctccgcactgttggtgaacatacagacctcctatatgggcacccaagcccaggccagtgkgagaaccttggcgggggggtggggaggatgagaaggggaggcccctagcctgactcaraggtgaagactgctaggccctgctgtccttggggtacgactgtcagggcctytacctccccgcccccgcgggtgggcttctggaagtggatctccaggacgtcatgcagctccgggccatccaagatatcaggaatgttgagcaccagtaccgagcggggaactggctgcgacctgatctggaaaaggagccaggagatggcaaaggctcatgggagaagggctgggggctgggggtagggcaggcagtgccccatgggggtatgaggtcgggaggcctggagaggctgatggtgggtaggtaggtcagtggggtttggggcctctgatccttcattgggcaagttcctggcaggcagacaggttacccagcccagcccctgttcttcacccctcctgcttacctcagccttctggatctccccrttcacatacggagagactctcagagggacttgctgcccacccagtggcactgtgaactggccgatttggcacagacgctgagccactgtggggagcaaggaggggtgggcctttagcatcaagccctctcctctccctgcaccataatcttgcacaccctataccctctcccctgcaggaggcctgcatagccctcacctccatccctagcaaaccccagcatgacactccctggcagtagctcccgaacgtccacatcgccacctccgttcctagtcttgccaaagaagatctctagcttgtccagcagctcctcctcactcagcctgaggctggcaggaaatccagtgaccaacaccctccggccactcaactggctggacayctagggggagacagcaaggggtggtcccagacacagctccacttccccatgcccaggtgcrtggcatgctttgcatgccccaggattctgtcataccatcacctggatggtggtgaccatgggcagctccaagggctggacctgcacccgcagccggcactcctccatgttgatcgtgtgctccttttgttgcagcacctgctcagccactgggtggtgggaaacagggtyagtactgggaaccctccccacctccctcctgaggctccccatgagcttacctttggggtcatcaaaggtgatcagagcagagcccgcaagcagagggcagtggatccgcaaattggaaactaaagacttaggcacttccgggtcctgctgggtgtgtcctcggaataccagggggatcttgggcactgaaaatgggacctggaagtaggggaggggagtaggagtgttcctcactcccacctaggaggaaggcatctccgattccattccattgatgctgagtgccggagataaatacatttactgaaagaaaagctggataaatgagtggatgaatgcaggtctggtccatacagggcaatttacatacaacatcttaatttgtcctgggaggtgggtagctctactttacagatgttcaagtaacataatggaggtcacacagcaaggaagtagcagagccaggaataaaaccgagaactccccagctcttttttgtgtttctttgttttaaagggagtcttgctctgtcacccagctggagtgtagtggcatgatcttggctcactgcaacctccacttcccaggttcaagcaattcggactcagcctcccaagtagctgggattacaggcatgtgccaccaaacccagctaatttttgtatttttagtagagacggggtttcaccctgttggccaggctggtctcaaactgacctcaggtgatccaccagcctcggcctcccaaagtgctgggattacaggcgtgagccactgcgcccggcctaatttttgtatttttagtagagatgggatttcactgtgttggccaggctggtctcaaactcctgacctgaggtgatcaggcccccttggcctaccaaagtgctgggtttacaggtgtgagccaccgcacccggcctcgccagctcgtttttaccaaacaacaccagatctcccaccttaccttgtctttgggggagtccccgagctcctttctcagctgctgcaggtcccacagcctcatcttgagtctggcctsctcctcctgaagggcgtggagggcctgttggggcagaaggaaacaacaagacttctacccgcccttccagagaatcaacaagcccaggggaaggggggcctattctggacgctccaaaagcagagttgatgctaagctcaagaacaacccaacccctttgtgctgccctgggctggtcttggccccctccacccagggcttggctggcctcatctcagctgctcttgaaagggcaggagcctttgcagcgtccatgacttgttcgtgaccacagatctagagttcaacaaacactgattaagctcctgctagaaagtgctcggcactgacacaggcagtggaagataagggtacgaccctcaggcctgccaaacagtgctcaagagtacatgatcacatgactgactgtgaagggcagccggaatttggaagagggacaatcccaaaggggttaacccaattagggacacctccaagaggaggggagactagttgcaaaatgtcatacagtcatattcttaactaacgtttactaagtacttactatatgccaggcactgtgctaagcccgtctgatgaattatttcattcaattcttagaacaacagggtatctaagatagatatcctgtgatccttattttattgatttatttttttaatttttatttatttatttatttttgagacagagtcttgctctgtctcccaggctggggtgcagtggcgcgatcttggctcactgcagcctccacctcccaggatcaagtaattctcctgcctcagcctcccaagtagctgggattacaggcacccaccaccacacctggctcatttttgtatttttagtagaaacaggttttcaccatgttggccaggttggtctcaaactcctgacctcagatgatctgcccgcctcggcctcctaaagtgctaggattacaggtgtaagccacaatgcctggccaatccttattttatagatgaggaaattaaagctcagagaggttaaatgacttgcccaaagtcatttggccctaggctgtctgactccagagcccacccactaacctgtgctttacagtgaagaaatgaagcccagagtggggaggtagtttacccatcaattctagcttgtccctggactgtcacactttccactgtacaccaagtaaccttttaggctgggtgtgatctggaatgggtccagagagagaactgacatcacaggcagggaagtgacaccagggataccaataaatgcacctttgtttgtggaatagagcagagttcaccctgtggttaggaatcctgataaagaagttcagctcagagaagcatgagatctcttggaaagataggactctgttctgaccatctctgtattccttgtgtccagcaagatctccggcacaaaatatgtgtccggtaaaactgtgttgaatgaagaaatgaagtgaatgaatgacggtaaaggagcacattacagaggacaccaaagaaattcagtgtgagtttgttctatttttagcagaagaatactagagcttgaccaaattatgctggtttatgaatagtgaaaaagatcattagttattcatatttctgtaactcagagagtgctaacacagtgcctttaagggccagttggatgacattaatgagttaatagagccatgtaggataacagagagtggtggggactctgacgcactgggaagagcatgtcctttctaaagtaaactgcttctagccataacaaagtttccccccacagcaaatctacccatgtttttgttttgttttgttttttgagacaaagtctcaatgccacccaggctggagtgcaattgctccattatggctcactgcagcctcgacctcccggaatcaatcaatcctctcatctcagcctcctgagtacaggcgtgtgccatcatgccagctattttttttttttcttctttttgggatggagtctcaccctgtcgcccaggctggagtgcagtggcgcgatctctgctcactgcaagcttcgcctcccagttcacttcattctcctgcctcagcctcccgattagctgggactacaggtgcccgccaccacgcctggctaatttttttgtatttttagtagagacggggtttcaccgtgttagccaggatggtctcgatctcctgacttcatgatctgcccgtcttagcctcccaaagtgctgggattacaggtgtgagacaccgcgcccagccctctatttttttttcttttctgagacggagtctccctctgttgcctaggctggagtgcagtggcgcaatatcggctcgctgcaaactccacctcccggattcaacagattctcctgcctcagcctcccaagtagctgggattacaggcacctgccaccactcctggctaattttttttattttttatttatttatttattttgagacagagtctcgctctgtcgccaggctggaatgcagtggcaggatctcggctcactgcgacctctgactcccgggttcaagcgattctcctgcctcagcctcccgagtagctgggactacaggcacgcaccaccatgcccagctaatttttgtatttttagtagagatggggtttcaccatgttggccaggatggtctcaatctcttgacctcgtgatccacccacctcggcctcccaaagtgctgggattacaggagtgagccactgtgcccggctctaattttttatttttagtagagatggggtttcaccatgttggccaggctggtctcaaacttcccacctgaagtgatctgcccaactcagcctcacaaagtgctgggattacaggcaggagccacggacccaggccccctaatcttcccatttttaatagaaataaaaaatctgggcaggttgttgtggcacatgcctgtaatcccagcactttgggaggccaagggaggcagatcgcttgagcccaggagtctgagaccagcctgggcaacaggacaaaactctacctctacaaaatatttaaaaattagccaggcatggtggcacatgcctgtagtcccagctactcgggaggctgagatggaaggatctattgatccctagaggtggaggtggctgcagtgagccatgatccagccactgcactgcagcctggaaaaaacagtgagatcttgtctccaaaaaacaaaaaatctggatttttatttgaaaaagatggcccaatttaacgtatataaagccgggtgctgtggctcaagcctgtaatctcagcattttgggaggctaagggaggcagatcatgtgaggtcaggagttcgagaccagcctggccaacatgctgaaaccctgtctctacaaaaaattagccatgctgggcacggtggctcacgcctgtaatcccagcactttgggaggctgaggcaggcggatcacgaggtcaggagttcgagaccatcctgcctaacacagtgcaaccccatctctaccaaaaatacaaaaaactagctgggcgtggtggcgggtgcctgtagtcccagctacttgggaggctgaagcaagagaatggcatgaacccatggggcggag

SEQ ID NO: 93633 - DNA, 70973 bp, Homo sapiens
gagggggaggggatgggaaggggaaggctgaggggagggggaggggagggggagtggggaggggaggggaggggaggggaaaaaaagaaaaagaaagaaaaagctgtggaaactgattgcagctcagggaagaaacagaacaagactctctacccctggggaagggacagaaagaatgctgggctcagaatgacatctgggatgggggtatgaacacagagaatgccaccagcacccaagaccctgagacatagtgcctgcctgatactgagggttaatcagaacaacagacagcacaagcccctgacttcccacctccaggctaacaagctgctagtgacaactaacaatgacttcctgctaggagagagtatggagaggcgtctccaaggtgtctctgaggtggcaagggaagcaggaaacagattgcatactcatgtgaattctgaacagaattttaggaaagtactagttacagagtggcaggcagattccaggactaagaagagtgctgcagcactgaggcattagcacccatggggaagtgttaatgccggagcagcaaggaggagaagcagtagaattggagtgagagctggaagcgggcaagcagggcctgcccagtaggagccacagtggcagagaaatacagccactgccttgccataatgaattatggcttcctaatttttagtgtgtctctcctcttgtatctcctgctggtacttccattggctgatccaaccaatagccagagggccagggagttggggtgttgcaatccataatgatcagttccctggggcacagagcaaagccaaggaaggtagagaacggatggacgggagcaaatggaaaatactagcataatacattctcacgctcctcctgcatcaacacaacactggctccaacttcatagccatgcagcctctccctcctcagggttcagaccaggccctcttctcttttctctctactcactttctctctaatctctactcccacagtgattacttttatatttacattagcctagtcctctcctctgtgtcctgcactcagatccaaatatctgctgacagctatgctctggtgtctcagacattgcatttctgacccatctgagcctattaatggtcttagttcttctctctctgtatccaattcatcagcaagtctgatcaattccacctctaaaatatattacaatctgcccatcctttcttcttgtcacccctgccgccacatcagtccatgccaccacattagtccaaatcacaacatttctctcttgtcctcctctgatccattctagacctggcagccagaggggaccatcttaaaatgtacactagatcctgctacttccctgtttaaactttccgctgttttcccaaaccccgtgctatgctctgccttcctcttctacttcgtacccacctgcttactactctcctgcttactactgtctagtgacactggcttttccacatcctcagagaagccaaattctctcctgactcagggcacccctcctgctacaagtcactgctcccacctggcccccatgtttcagaaggtgtcttcttctcgtccttgggattggctaaaatatctcctcaggaatgcattccctggccactgtttttgaagtttgttctctctccatcccattattctctttttacctagtttatttccttcttagtattaaccacattacaatttatctgtttatgtttgattgtgtttttgtcagtctctcgttagaatgcaagctccataaaccacattctaatttatctgtttatatgtttgattgggtttttgtcagtctctcgctagaatgcaagctccataaagcaaggattatgccctatggctctcttgacatctctatggtctcaagcctagcacagaccctggcataatgtaagtattcaataaatattagagcaccttatcatgctttccatgtgccagggactatccttagtttcataaaaataagactgccttaagtctgcataacaaccctgggaggtaggtatttactatcattcccatttataaaagaggaaactgaggcatagaaagggtaagtatcttatcaagagtcacatgtttaggaggggaaagaggtaagatgcaaacccaggcaatctgatgccagagccagcacttttaaccactatgcaatacctattcccacattcacttgcacagatgaattaataactacataaatacattaataaagtggaaggacagacatagattgtatccataagtctgcctagggaagtaaagaggatagtactgaagactgagtttgtttgattgatgcatgtgaggagtgtgtgccaagcacagagaatcatacctgcaaagccacagatgcaggagaagtattgcaagggaacaagcagttcagtttacttggagtataaagtgaaaagaggaagggaaggaaatagggtagtaagaaaaagttgatgaggccaataggaaaggaaaagcttatagtctatacaaagcagtttaaattttatccttaaagatttaggaagccactgaaaaaatttaatcaggatggagacacaattctatttgtgattgagaaagaagatccttctggtagtggtgtagcacagactttcttaaagttgagtaggctacattctttcaagagaagaattttttcctgaacacttcagggactgctgatacttttaattataatgttactatataacaaaatataacttccatattgttacagcttttagtcataaaagcaatataaatgtatatcctgtctaaactaaactacaaactaaattaaaatatagttaaagggccgggctctgtggctcacgcctgtaatcccagcattttgtgaggccaaggcaggcagatcacctgagggtgggagttggagatcagcctggccaacatggtgaaaccctgtctctattaaaagtacaaaaattagctgggcgcggtggcgcacgtctgtagtcccagctacttgggaggctgaggtaggagaattgcttgaacccaggaggtggaggttgcagtgagccaagattgtgccactgcactccagcttgggcaacagagcaagactccatctcaaaaaaaaaaaaagtagttaagcataatttaatgcaatggtgttttacttaacgtagttgcttattcagaacatgcagtggtattaactgttttgatgcaggttcatcagagtttgaagaaaagggaaaaggagatctgagaagttgctggtggatttaagttggatcatttttaatgtccttcagcagtcataggtaaataaatcccttttaaattatattttggctgttgaactacacttgacataactctacttgcagaataacatctcagactgaacctcacggattatagcttcagtagtaacaactacaagaatttaaacttattatatttttctttctacgctaatctaaaaatgcttaatataaacatataaacgcattctgtatcatctatatcttcataataaagctctgctgcaagattttagtgcctacatttgcttttgagtttactatccaattactactatttgaattatatcagatttgtgtgaggaaatgggtgtgggggattcttaataggtaaatgctgctttccatcacttctggctggataaaagctaaccgattcaaggagttcaaggagttctgaagaagagaaaaatgttcagaatacctggaaactggaggaagaattaagaaaagtctggataagcctgggcgcggtggctcatgcctgtaatcccagcactttgggaggccgtggcgggtggattgcctgaggtcaggagttcaagaccaacctggccaacatgatgaaaccccatctctactaaaaatccaaaaaattagccaggcatggtggcaggcacctgtaatcccagctatttgggagggctgaggaaggggaatcacttgaaccccggaggcggaggttgcagtgagctgagatcacgccactgcactctagcctgggcaacaagagcaaaactctgtcttgaaaaaaacgaaaaggctggatgaaagctaaatttaccatttattgagtgttgacaatgtgctaggtactattatatcatctgacacttttttttttttttttttttttgagacggagtctcgctctgtcgcccaggccggactgcggactgcagtggcgcaatctcggctcactgcaagctccgcttcccgggttcacgccattctcctgcctcagcctcccgagtagctgggactacaggcgcccgctaccgcgcccggctaattttttgtatttttagtagagacggggtttcaccttgttagccaggatggtctcaatctcctgacctcatgatccacccgcctcggcctcccaaagtgctaggattacaggcgtgagccaccgcgcccggccgacacttttaatccttacaaaaaccctattagattcatattactatctgtttttatggggaaactgaggctcagagagctagagtcacacaactggtaattaacagagacaagattggaaccagctgggactaactccaagtctatgctctaaactattaggcaatactgcccaaatgaaaatgattacatagtaattaagtatattaacaaaaagatgattttgtattcttactctataaatcaaaagtcatgttcaattgtggcaagtaggttttctgagagatttatcttcatgagagatttcaatagattggtctggaaaactctgtggcaactcaaggtaaagtaaaagggaggagacgcaaaaactgctttaacactaaaaatctgtaaacaaagttaatggtaatccctctattggaatggaaatcccaaatcagtaataatagctcatgaaagcaaggtgtcagaaaactgctttgccagcaaatcatttgtctgtttagagctcatcattcttttttcttttttaaatcatcacggatcaacatttttaattttttttttttttttttttttttttttttttttttagatggagtctcggtctggagtgcagtggcgcgatctcggctcactgcaacctccgcctcctggattcaagcgattctcatgcctcagcctctggagtagctgggattacaggcacgcgccaccacaccgagctaatttttgtatttttagtagagacgcggtttcagcatgttggccaggatgccctgggtctcttgacctcgtgatccacccgcctctgcctcccagcgtgctgggattacaggcatgagccactgcgcccggactttttttttttttttttgagaccgagtttcactcttgttgcaatgacgcgatctcggctcactgcaacctccgcctcccgggttcaagcgattcccctgcctcagcctcccgagtagctgggattacaggcataagccaccatgcccggctagttttgtatttttagtagagacggggtttctctgtgttggtcaggctggtctcgaactcaggtgatccgcccgcctcggcctcccaaagtgctgggattacaggcgtgagccacagcgtccagccaacgtttttaattcttaaaactgtgtttgaatgagtgttgggtttttgttgtttggttttctttggggtaagggggttatcaccttacacaaaaaatttacatcataatatgaaaatgcccattggttcattcaaggaaaaacataaagaatttctaacagaatggattaatggggtggaagaaatttatccattctctaaaaatttttcaaatcccaaaaacttttttttttcattttacaaaatatttacttcaaacagtagctggcattttgcatttaagagttcgaccaaaagggacagaaatataaattgctaattattagcaatggaaatgaaaatgaatcagaagtgacaataaagatttctaaaattacaagtcgatgaaaaatgaatttactgtaaattggttaacacaaatcgctgtagtaacatatctgctatgtgaaatttttaaaataaaaaccagggcggagaaggggagaaggagatctctttccaaggcccaccacccaaattctaattcttagttcacagatccaaataataataatgtgttgttctatgacttctagtattaaaagtaaatataaatttactctgcatattaaacatttacattattctaggacttctcctttaaattacgatagtacacacacaaaaaccttatttatctaattgcctttcgttggcacataaagacaaagatcgtttgcaacataatcgcgttctgatasgtttgaccctctctagtcttcgtagaaggtggccaaggtttccgttaccccggcgtccctcgggcaccgcggaaacgaaactccatcaggctccgccccacggtctgcggagtgagccaatcagggcacagcctgcgttgaccgcgtgccgggtgtcatggcggcctgcaggtactgctgctcgtgcctccggctccggcccctgagcgatggtcctttccttctgccacggcgggatcgggcactcacccagttgcaagtgcgagcactatggagtascgcagggtctcgagctgtggccgtggacttaggcaacaggtaaggagtgacgtgcgttcactgtattgtcataaggtgtcttgtccarccagcttgagcgtattcatctcccagggtagaaacccggtatcccagctctatttaatctctccttaccctaaacctaaattccaratttccctttccgggtttggaatgtgtctcctcggaccctccttcccgcgctatgtcgttctctctgttggtgtgtgccgggcttctttgctccatccgactctgtccgtccacctgacttccgatctctttactttccgggaccactgggctcttaagtgggaaacattccacctaggaataacgagttgacgtgggtgagacgaggccccccgggatgctggcccggaccctggaagctggggctctgatgcccctcgagctgggacacagacctcagcagaggctccgggtggctagtgcaccacgggtcccccacgtcccactcctcgggctccttcagcctcctcttcaccaggagcctaccttgtagaagttgaacaccaggtccagttcacagacattgtggaaatattcgtttaagacctgggagaggaaggcagagatggtaagagatggacagggagagagccacacacgcacagagatgggaacaaggtcatcagaaagagacagcaaaaaaaagagaccaagagggaggcaggggagagagagagacagtgacagggagagaggcaaggagacacacagagagaaacaaaagcaaagatcgatgcaaagagatggcaaaaggtcaggcgctcacacctgtaatcccagcactttgggaggctaagacggaaggatgacttgaagttaggagtacaagatatcatgtcatccaatctaattgattgcctaaagtgtgaccactatgaccctgggttaggaggaaaaggaaaagtcagttttttgaacgccagttatatgatcctcgcaatctttttaaacctgtcgtaaaggtactattaccctcattttatagttaagactacagaggctcaaaaaaggttagataactttctaagagtctataaaaaagttagtattatgggactaggtggtttttgaatttctgttttttgcttacaaagcccatacttttttttaggggaccgctttttaaaaaaaaagtttgctttaatcgttcttagaataaatggaattgctaatgcaaacttcatatatctaaattttttacgtgtactttgaaaaaatttggaccccagttcatacaaaaagcaaaaaaatcattttgaatccaggtctcgcactctaactttgataagtarttgacattgaacaggttaattcaccattttcttgtgcaaagtgtggagagtggattccatcaagggtctgcaaacttttctataaaggaccagataatatatatattaggctttttggggtacacactgtgtgtatgtgtttacaaaccctttagaaatattttaaaaaacggccgagcacagtggctaacacctgtaatccgagcactttgggaggctgaggtgggtggatctcctgaggtcaggagttcgagaccagcctggctacaatggtgaaaccccgtctttactaaaaatacaaaattagctgggcgtggtggcaagcacctgtaattccatttacctgggaggctgaggcaggagaatcggttgaacccaggaggcagaggttgcagtggcagagatcgtgccattgcactccagcctgggtgataagagtgaaactyttgtctcaaaaaaaaaaaaaaaaaaaaaaaaataatatatatatatatatatatatataaacatttttaattgaagagtaatatagaaataggccacaagctgtagtttggtcacccctagactaggttatctctaaggcttattccactcccagcattcattaattctgatttttgagggaagtggacatctcttccattcttcaaggactacacatgcttcaaagaaatgcccagaacatttcattcaacagacacatactgtgagataggcattagatactgaaaacaagatgcagctgctgccctccatattttccataaataatctactttgactctttcatttattaatcaacctgttcctcttttgtaggtagttctttttaaactcgtgtcatgtgttgaaataactagactaataaaatatcatacctgctggataaattctttcatttttgtcttgtttgccattggcaacatttattgagtgactactatgtaccaggcacattatatttgttatcatatatattctttactgcattctggaagattatataattattgtaggtgtttttcagatagtatatttaatgcttacagtaaccttggaggcaggtgtttaattttcatttcagcaagcttttattgagcatctactatgtatcaaatcactgaggatattcaacagaatatgccacagtgggcaaaatgctaaggcagtagccccgttagtagagtagaactgtagctttcacagtttttcttccctgtgttttgggcccacttctgtctagttaaagatcctccactccccttcacagagatcacttaggtattcagaatttacmttggtagacagaatgccagttcctggtaagttttgagaagtactggtggcatgttactcagggttaaacaaaatttcaagatgtcaratttacatttgcctcatgaaaccattacttaatactgatttcagctataggttgttgcaggtctgtgatactacacagtgtgactggttttgagtatctcattccttccatctactcaacataytaatccagcatcagcctctctgtacctcattcccattagtcacaggagacccattttattgtaggctttcatcattataacatctgtgttgaataaatagaaacccaactagaatttctcaaatattccctgattttaaaaaaaaactaatatttcagagtcaagaatttgayactacaaaatcattgtatttattaacatatattaaatgtacatactttgttctgactttcaaacttaacaaaatgagtctaactgaatagataaatatgcttttcattaactcaggcttctggcaaaggtatttaacaggtgaaaatattaagggttgttccttcatctccttggtatgtgaaagacagaataatcttacytggggtagggcattgggcctgtctacatgcttgtgtttggtttgtgcattttcagcaccagactatgatagaatgttgccgaaactgagttcatgtgacacaacatctktctctgtatcttcaggggtcactgacttggtttcatctcaaaacaccttttgatgaatcttgagctctttgacaagttttgctggtctgtttcaagacatcagtaacctctttttgcattctctgctgaaactagggaataaggctaatagtgctgcctatttcatgtatataagacacctttattaagatataattcacataccatacagttaatttaaagtgtacaactcgtctgggagcagtggcttatatttgtaatcctagcactttgagaggccaaggcaggaggattgcttgagtccaggagtttgagaccagcctgggtaacatagtgagacctcatctctacaaaaaatttaaaaattagcccagcatggtggtgcacacctgtatttcgagctactcgggaggctgagatgggaggatcacttgagcctgggaggtcaaggctgagatgagctgagatggcaccacggcactccagcctgggcaacagagcaagaccctatctcaaaataagtaaatacagataaataaagtgtacagttcaatggatattagtatattcaaagttttgcagccattaccaccatcaattttagaacacttctatcaccctaaaaagaaattcattagtagtagtcacttagcgtttctccccagccccaggtaaccactaatctactttccatcgctgtggatttgcctattatgaatatttcttacatggaaacatagtctttggtgactgtcttctttcacttaacataatgttgtcagggtttatccatgttgtgacatgtattagtactttgttcctttttatcgctgaataataatcagttgtatggattataccacatttagcttatccattcatcagttgatggacatttgggttgtttccatttgggaactattatgaataatgctacaaggaacattcataacagctgtcaagtggtattcactgtgatttggatttgtatttccctgatagttaatgatattgagcatatttttatgtacttactggccatttgtatgtcttttttggagacatggctattcaaatcctttgccaagttttaaaattcagttgtctttattgttgaattgtaagcattctttaaatattctagatattaacacaagtcccttatcagatacatggtttgcaaatatttttctcttaatctatggtgtttcttttactttcttaattaaagttttaaattttgatgaaatcagcttacctatttttttcttttgtcatttatgcttttgatgtcatatttaagactttgtgtggcccaagtctctgaagatttaytcctgtgttttgtttctaaaacttttattgttttagctcttacgtttgggtctaggatccattttgacttaatttatgaagattcattcttttttgcatccagttgtccactattgcctcaaaaggctactctttcctcattgaattgaaaattgttctttccccttctgttgaacatgaaggtccttataggcaatatttaggagtttatattttgtcctaaaagcattgggagaaattctaaagtttktttttkttgttgttgttgttgttgttttgttttgttttgtttttgttacagagtctcactctgtcacccaggctggagtgcattggcacaatctcggctcactgtaacctccccctcctgggttcaagcagttctcttgcctcggcctccttggtagctgggattatagacacgcaacaccatgcccagctaattttgatattttttgtagagatgggatttcaccatgttggccaggctggtcttgaactcctgacctcgggtgatcaggcctgcctcagcctttcaaagtcctgggattacaggtgggagacaccacgcctggctaaaggatttttaagtagggaaacaatcctgtttgtatgttaaaacattactgtagtcaacaaggtgagagatgataagagactgtactaagatggtaaatggagccaggcacagtggctcatacctgtaatcccagcactttgggaggccaaggcaggagaattgcttgaggccaggagttcaagaccagcctaaacaatatagtaagawctcatccatacaaaaactaaaattagccaagtgtagtggtgtgcacatgtagtcccaactactcaggaagctgagttggaggatcgcttgagcctaggtgttctaggttgcagtgagctgtaattgtgccactgcattccagcctgggcaacagagcaagaccctgtctcaaaaaaaaaaaaagaaaagaaaaagaagatacaaggcacaawgaccaccccccacctcaaaaaaaaaatagatggtacatgggaattaacatttagggaagcagttaacttctgaacctccaaaagactttcctgttcagatcaatcctgtgccttggtttccgtattcttctttaagccactcttaaattccacttttacttttgataatgatcatggattctgcccctttttgttggtggagtgggtgggttgggggttagaatcttcccttagaatcttttattattttatactaagcaggaattgtacagatgacctaagtcttcttgtattgcatttttatttttaaacaggaaattagaaatatcttctggaaagctggccagatttgcagatggctctgctgtagtacaggtaaaaagtccagatttttaaaattcatcttaaaaatggttacggagactcatactaaatgtgtaactacaacatcgtgtaactacttagaattttggtactggaaattaattcagatactactaagataatttctactgcaagaatcattccagacarccagagtccagagcactgcatgtattaagtgacctatttttttttttgaggtggactcttgctccatctccaggccggagtgcagtggtgcgattttggcacactgcaacctctgcctcctgggttcaagcgattcttttgcctcagcctcccgagtagctgggactacaggcgtgcaccaccacacccagctaatttttgtatttttagtagagacggggtttcaccatgttggccaggatggtctcgatctctttttttttttttttttttgagatggagtctcactctgttgcccaggctggagtgcagcggcgcgatctcggttcactgcaacctccgcctcccaggttcacgccattctcctgcctcagcctccttagtagctgggaccacaggcacctgccaccacgcccagctaattttttgtatttttagtagagtcgaggtttcaccgtgttagccaggatggtgttgatctcctgacctcgtgatccgcctgcctcagcctcccaaagtgctgggattacagacgtgagccaccgcgcctggcctggtctcaatctcttgacctcgtgatccacctgccttgcccccgcaaagtgctgcaattacaagtgtgagcgaccgtgcccagccgtattaagtgacstttaacatcctttccaaacttgggcttctgttttatgcgttaataaattctgttgtgcttttctagagaaagygattttggtattttcttctatagtaataattggggaatttttccttatgtatagccacataagaagtagagaatactattcaattcattgaatatgactaaattacctgttaatctttccttattttgattccatagcttttgaaaagctcagagatcaagattggactacttgtgaatattttttatttcataatcgtgtcgtagaattagatatcttttcttgagtttaattggagtaaggatttattcagttgctacttagatgctaatatctgatttcaaaggaacttaccagcgttgttctttatgtttaagtcaggtgacactgcagtaatggtcacagcggtcagtaaaacaaaaccttccccttcccagtttatgcctttggtggtaagtatttgctgatttatctgaactgtaatatggwctgagtaaagtgtagaatgtataatatttttgtccagtgtctagtgagtggaaaatacaaacttgcacaacaaagaatttttcctagttttttgatactgattcattaaaagagtataaactgcttcataaacaaatactaggattaagcatactttagaatttggaacgtccaggtgcgtaagttgacaagaagattggaagtgcatgagtactttgacattgaataagcaatgaattcattgccctcatagtttcccttcagtatgactctgcaagtacagtcagccctccatgtccttgggttttgcatccatggattcaaccaaccatggatygaaaatattgggggaaaaattgcatctgtactgaatatgtacagactttttttcttgtcattccctacgcaatacggtataaaaactatttatgtagaatttacattgtattaaggattatatgtaatctagagatgatttaaagtatatgagaggatatacgtaagttrtaaacaaatactatggtgttttacatcaaggatttgagcatccatggattttgatatctgcaagaggtcctagaaccaatcccccagggataccaagagacaactgtgtatatttagtaatgagctcatgagaattttatagctcccttctattatgaaaaggggtgtacaattatatttaacagagttgataccaaaaaaaagcaatgtttgacttgatcagaatgagcatctgtggcaaatagtgagtcttcttccacttttactgttgagtagaagacttttttttttttaagagacagggtcttgctctgtcacccaggctagagttgttcagtggtgtgatcatagttcactgcagcctcaaactcctgggcttaagcaatcctcccacctcagccttctgagtagctaggactatgggcacaggccattgtgcccaactaattttttttttgttgggggtagagacaaggtctttctgtgttacccaggcagttctaaaaccctggcctcaagtggtcctcctgctttggcctcccaaagtgctgggattacaggcgtgagccactgcacctgaacgttttttaaaatcactttgcagaaacatttctatcaactttcctctccccaaaagatacaaaatgctaagtaaataacattttctactctgagtctagactgtgttgttagcaacctcaggagaattagcattcatacagtatagtttgtttctgcaaaaagaattatatgaacttttttttattgctgcttcaggttgactacagacaaaaagctgctgcagcaggtagaattcccacaaactatctgagaagagagrttggtacttctgataaagaaattctaacaagtcgaataataggtaagatattaacatagaggcgttcatcttctctggtatgcctatgttagcatctcttctcttgcatctgtgttctacaataagtcttaagttttccttcatagcattaacaccacctaagattattcactccttctcttccctcactcaaatgtgggcactgtgaaagaaaaaacttttatttcttcagggttgaatccctagtacctgttatactgcttagcacagaataggcattcartaaatatttgttgactaaatgagtaaatctctattgagcatatgaattttttggcccatgcctctactttgttgaatctattcctagtacattttttcatgttcagaatagtaattcctaaacattatgttcatcagctactgaaatatgtccataatctttcaaatctttaacatccctacatattgtgggatcatatgtaatttatagctcttctacccagaaattgcttttttttgagacagagtcttgctctgtcacccaggctggagtgcagtggcacgatctcggctcactgcaacctctacctcccgggttcaagtgattgggattacaggtgcccaccaccatgcctggctgatttttgtatttttagtyaagatggggtttctccatkttggtcaggctggtcttgaactcctgacctcgtgatccacccgcctcagcctcccaagtgctgggattgcaggcgtgaaccactgtgcycggccagaaattgctattttatgtatatttatatacagtcttcagacacaaagtagcaaggaagcattttcttttggtctgctattggtcttaagtctctttgctctgcttatatatgtaactgttgcctgtggaaccagaatgaaaaattgctccccaatctttattgttaatgtgcttcttctgtgtttgttttttgttgttagggcatggtatgtaataatggaagcactgacatttatctgtgtccctcttagtaaatcagtccaaggggatttttcttgaaaacatattgaatggctatctatattagttcaaacgttttgaactgtaaagcaactctgtcagtacggtttaatgtgtttttttttcttttggcagatcgttcaattagaccgctctttccagctggctacttctatgatacacaggtagattctgctttaggttttttagttgccagatcaatcaaaaattacttaatgaatctctgtaatatttcctagagtaaacattataaagaacataagaattttttatgatactgttatattttacattacgtttttgaaaaaagatagtactttttttttttttttttttgagacagagtctcactttgtcgcccaggctggagtgcaatggcacgatctcagctcactgcaacctcaatctcccaggttcaagtgattctcctgcctcagcctcctgagtagctgggattacaggcacgcaccaccatgcccgactaatttttgtatttttaatagagaccagttttcaccatgttggtcaggctggtcttgaactcctgaccttgtgatccgcccccctcggcctcccaaagtgctaggattacaggcgtgagccactgtgcctggccaaaagatagtgcttttaaaaagctaacatttattcagtgtctgtttgagttgacacctgaatttcagtaggagttagccaaccaaggtgtgtcagggaagcattgaaagcccagaggcaggaaagaaattaatgagtttaaaaagaagatcagcgtgactacagtgagtggagaccaaatcaggctgggaataggacaactaacgtaactaatttttattacctaattttattgctggatcctctgaacctctactttattatattttaatacttcctgaataatactttctttcaggataatgacacatatacttaagtaaccatttcattcatttgaaataaataaatacaccttgcaaatatgcctttgcaagaatatcacagccttagcctcaggaagttttttttgtgtcttgttttgttttgagtcaggacctctgttgcccaggctggagtacagttggcatgattatgsctcactgcagcctcaaactcctgagcccaagtgatcctcccaatttagcctcctaagtagctgggactacaggcacaaaccaccatacccagctaagtttttttgttttttgtagagagggggtttcactatgtaagccaggctggtcttgaactcctgctctcaagcgatcctcctgcctcagcctcccaaactgctggtattacagacatgagccaccacacccggtcactgaagtttttttctgaagtgcatgacataggcacattattgcagtataaagtttgtttaatctatgcttataaaaagaacttttttaagtgcatgacatgggcacgttattgcagtataaagtttgtttcatctatgcttataaacagaaattttttttttttgagacagagtctccctctgtcacccaggctggagtgcaatggcgcagtctcggctcactgcaatctctgcctcccaggttcaaaccattctccctgcctcagcctcctgagtagctgggattacaggtgtctgccaccacacctggctaatttttttctgtttttaatagagatggggttttgccatgttggccagactggtcttgaactcgtgacctcaagtgatccgctgcctcagcctctcaaagtgctggtataggcctgagccacygcacctggccaacagaaattttttattggtttgtttgtttgttttttgagatggaatctcgctctgtcgaccaggctggagtacagtggcgcgatctcggctcactgcaagctccgcctcccaggttcacaccattmtcctgcctcagccacctgagtagctgggactacaggcacctgccaacatgcctggctaattttttgtatttttttagtagagacggggtttcaccgtgttaggcaggatggtcttgatctcctgaccccgtgatctgcccgcctcagcctcccaacatgctgggattacaggcgtgagccaccgcgcccagcctttttttttttttttgaaatggagtttcactcttgttgcccaggctggagaccaatggcgcgatctcagctcactgaaacctctgcctccgggttcaagtgattctcctgcctcagcctccctagtagctgggattataggcgtgcactaccacgcacggctaatttttgtatttttagtagagacagggttttgccatgttggccaggctggtcttgaactcccgacctcaagtgatccacctgcctcggcctcccaaaatgttgagattacaggcgtgagccaccatgcctggcctagaaaatatttttatatgatagaaatagctaacatttactgaatacttgcaacatgcgaggactgtgmtaagtgctttacctaccgtatttatctgattctcataggaaccctttgggaagaggccattatttttcccgtttatttatttatttagagacagattctcactctggcacccaggctggagtgcaatggcgtgatctcagctcactgcaacctctgcctcctgggttgaagagattcttctgcctcagcctcctgattagytgggactacaggcaccggccactacacccggctaatttttgtctttttagtagcgacagagtttcaccatgttggtcagactagtctcaaactcttgacctcaggtgatcsgccctcctcagcctcccaaagtgctgagattacaggcgtgagccaccacgcctggcctgtttttcccttttaaagatgaggaagcttttgaggtttaatttaagtaatttatccaatgtcaagcatttcgtttaatgacagccaaaattaagaggtttggctacaaagcccctgcttttagccatatagtgctcttgtattttaggtcaggatgttaacctaaatgataacccttccaaatcaaattttttcccttttaccaggttctgtgtaatctgttagcagtagatggtgtaaatgagcctgatgtcctagcaattaatggcggtaagtataaaagtagagattaaaattatcagattaaaaatttttttaaagcaatgaaattttaatttcggccctgatttttctccttttttaagcttccgtagccctctcattatcagatattccttggaatggacctgttggtaagttaggatttaaaagtaagaaatcatatgtgtattttttttttcagtaagtagtagtgaccatgttacagcaatggcatatggctctgatttattacctcttcatgaattgaactagatgacgttctaagtctcctttcaggtctttcagacattttcatccttgtcttgggttctgtttctaatagcatatgttacggtattacagattttatgtccctagatattttgacttcataattgtctctttctgttagaggacttctttttttttttttttttaactgggaaattatcagagtatatactccttcaggatgaaattaatgtaacttacggctgttataagttcataatcatgcaatataaaaatggctcastgagtaaataattatcaagtgtcctaggcagagcaggccctagcaatacaacaatgaaagatgcagttcttgatctctgcataaaggagacagataattacttatratcagtgttattataaagacatagtcaaagtgctaagaatatgatagagaagagcagatttgattttgtgtggtcaggttgtcaaggagggctcctcagagtagtcatttgtgtaagctgaaccttagtaggatctagtgttaagcatttgcgttagagagaatactgactggctagaccaggggacaaacatgagcataatcccagaggtgtggaagaagtggtatatttcagcaattcagagtgatccagtgaggacagaaggtagggtggggtaggatgttctgtgggtcttaaataccgtgtagaaacatggattttattctgtggtcacaatcaaagatggggttgaagccatgactggaataatgtcttgaaaactgggtatttccattaaacagttgccaatattctaatacattttaggggcagtacgaataggaataattgatggagaatatgttgttaacccaacaagaaaagaaatgtcttctagtactttaaatttagtggttgctggagcacctaaaagtcagattggtaagttgttttaaataccacatttgttctggattttacttacaagttctggcttcttaaactgaatttaaactctgtgtgtatgttttgtcggtagccataaaaatttttgtcatgttttatctctgtcctatttttgtgctcttgcttcatatcaaatgattcctaaaattacaggattttattcaattttatttagaatatacaaaaatatttaccaagatcatttcagtaattatttttagactaaattttaattattaaaattatgactaatttttagtctaaaaataatttcaataattatgtttagactaataagttattagtctaaataacttattttaaaaatagaagttctaagtctggtagtaaccattttattagtttaaacattataatttagctatttcattctaagtctgcttggtatcctcttgagaagtgacccatttctactaggtggaaaactggtaataaaatagaagaaatgcattgaccatgggccattttcacttactccttgtgacagaaatgtcatacttgcatgaacgaaaatcaggtccttgttctgtggaaggaaaatgggctttagcagtcagaatgacctggatttgaaacctgtctctgccactataatcatgtgatcttggacagattatttaagggcttttattgttggtttattctactatgtgatgtttgatgtgtgtgactttttgacatagggtcttctgatgtgggaacattttgatgaaacaaactattcaacttttactgcttttttgtacaagtaatatgtgaaacatctcatttccagcttcttctggtttgttagccagtgatgaagttaaaattaggttctataagttagaaaaatccccacatattagttgggggttgtgttgtcgaaccaaataaacaagacttaaacaagatggaaactttatttttctctcaggtaaaagaaattcagaggtggtaaatctaggacagtgatagtggttacatgacatcttaagaaatctagattccttttagctttctcctctgctatcctcaagatgtggcctcgtcttcatgcttatgaactggcatgaagagctctggccaacttatctgacttacaggcaggaggaagaaaaaagaagggaacagcaaaaaggtgtgtggcagttgagtaagtcaacctgcgttttaagcacctttcccagaaatccccacacagtagtttctatttacacctcattgagcagaactgtggcacatgactatagcctcgactgcaagtgaggcaaggaaatgatttttgtattctgcctgcagaaggtgggattcgtactgtgagtaactatcaaaatgtagagaggatattccaaagaatggggaagccatgaataatagatgatgtctacctcatgtttgagcatctcggagccttgagcaaagtattggtttcctgttcatctgcattggaatttttgctgaaagttacagcgtttgtttattcgctgttagtaaactagtctcattactttacagggtagttatgaagataagagtcaagatttgcaaagtgcccagcatgttacctaataagcatacagttaatacctgctattatcattaagacacagaaatggccgggcatagtggctcacgcctgtaatcccagcactttgggaggccgaggcmggcagatcacgaggtcaggagatcgagaccatcctggctaacacagtgaaaccctgtctctactaaaaatacaaaaaaaaattagccgggcgtgttggcgggcgcctgtagtcccagctactgggaggctgaggcaggagaatggcgtgaacccgggaggcagagcttgcagtgagccgagatcacaccactgcactccagcctgggcaacagagcgagactctgtctcaaaaaacaaacaagcaaacaaacaaaaaagacacagaagtaaacctgctgctaattggtcatatagccactatctaccttagagtttgaacccttctaattgttaagtagacattagaggaatgaactaataatcttttttttttttttttttttttttttgagacatagtctcgctctgttgcccagggtggaggagtgcagcagtgcgatctcagctcactgcaacctccgcctcccaggttcaagtgattctcctgcctcagtctcccaagtagctgggattataggcgtgcaccgccatgcccagctaatttttgtatttttagtagagatggggttttgccatgttggctaggctggtctckaattcctggcctcaagtgatctgcccgcttcggccaccaaaagtgctgggattataggcgtgagccactgcacccagcagaaccaaggaatctttgctgcacatgtggcatgccacagaaaccccacaggccaacttccagctggctcttctcacctgttgctcacaggagggaagaatgagactctagagcgcataaatttcagagagtagtcttgggtagagggaggctgagagtgattcagaaccaacctgtaaggggatggtttttaggaattaccagcctccattttatgacttttgcatcactatttccatgcagctattcagccagctctctctgctttcataaagatgcatcaaatatgcattttaaccccttgtttacctgttaaagttaacatcgggtccaagtgaaataccaccatcatggaacttctgtgatacaaaaatacaaaaaagtaattgctactatttcattattaaaatatttagtcatttagtcatccaaatctttttttttttttttggagaccaggtctctctctgttgccsaggctggagtacagtggcatgatcttggctcagtgcaacttccgcctcccaggttcaagtgattctcttgactcagcctcctgagtagctgggattacaggcgtgcaccaccacacctggctaatttttgtgtttttagtagagacagggtttcaccatgtttgtcaggctggtctcaaacycctgacctcaggtgatccacctgcctcagcctcccgaagtgcygggattgcaggcatgggccaccactcccgggcagtcatccagatctttagagtataatcttacacggcaagaatagttactccatgctgtcagctgctgggttacttcaacaccaacattctgaacmgtaccatttagatgtttgttttcaactggtatatttaatatcactaatatttctgtgtgtgagaagatatcggtcaggaaaaagtataccagtaacatgtttttagaagatattttgggtctagaatttatagcttcagctaatctcaaaactccttcatcttcaactgctaaaatggttgacagtttatagcaatcttcttttttttttttttttttttttggktgagatggagtcttactctgtcgcccaggctggagtgcagtggcgcaatctcggctcactgcaacctccatctccaggttcaagcgattctcttgmctcggcctcccaagtagctgggactacaggyrtgcmccaccacacctggctaattttttatttttagtagagatggggtttcaacatgttggccaggctggtctcaaactcctgaactcaggtgatccacctgcctcagcttcccaaagtgctgggattacaagcgtgagccaccacgctgggcctatagcaatcattttgacaagcttttatgtttaaatttttagcatcgatagcagtgttgtccagtagaactctgcagtgaagggaatgttttatatckgatcatgtggctacttagcacttcagatgtggctagagtaactgaggaaccaaaattttaattttgtctaattttaaataatttaaatgcaagtagccatatgtggctagtagttaccatattggacagcacagctctgtagactcaactgtaaggagtgttctttctttctttctttctttttttaagacagtctcactctgttgccaagctggaatgyaatggtgtgattatacatcactacagcctcaaactgtggggttcaaacgatcctatgtcctcagcctcctgagtagctgggaatccaggcacatgtcaccacacctggctaaagaaattttcttagaaagtattttttaaaaggaattgcattaaagtttaatgagtgaaaacaaagtttatttggggggtatccatttttctttgtcatattctattttttaaattttaccattatttttattagatatagcatctcattatattgcccaggctaatctcctggcctcaagcaatcctcctgtcctggcctcccatagcactggaattacaagcatgagccccatgcccagccatattttttttttttttgaatctggytctcaactctcctcaactctrttgtccagactagagtatgagtatagtggcgtgatcrtggctcactgtagcctagcctgaaactgctggcctcaagtgatcatcctgcctcagcctctagaatagctaggattacaggcacaccaccgcagctgagttttttatcttctagttgttatctttttagggacaggaccttgctgtgttgctcagcctggtcccagactcctggcctcaaataatcctcccaccttggcctcccaaagtactgggacaataggcatgagccatcacacctggccacatattttatttttaaaagcaatttattgagatataatttatacccattaaatgaatttttaaaaatctccggattaatcctgtcaaagtgagaggatatcttggaaatacagatgagaaaaagaatatagccatctcagtatcatggtatcagaagaaatttcttcaggcctggtgcaaaatatggaaaccttatttccctttaccctctcccatttggaatgcaattgttatcattttcttctacagttagaaccatatcaggcagtgttacaatttttgcttttgcttcaactgtcaaacataatttagaaaactcaagagggaaagaaaagcttattgctctgtatttactctttttctctatttatttatttatttttttgagatggagcctcattctgtcgcccaggctagagtgcagtggcgtgatctcagctcactgcaacctccacctcctgggttcaagtgattctcatgcctcagcctcctgagtagctgggactacaggtgcacgccactatgcctggctaattctttcattttttatagagacaggacctcgctatgttgcccaggctggtcttgaactctgacttcaggtgatctgcccactttagcctcccaaagtgctgggattacaggtgtgagccaccacgcycagcctctatatttattcttagtttgcatactgattttctttcctttctaacagtccacgatgtcttctcttattttttcatttctgtttagaaaacttcctttagctatttctaatgcaatagaaaaaattctgttattcagtcctttagttggcttacttgaaacaggatcactgcagagatttccccatctgtgcaagaattagacaatgtgagaattaattgttaaacaggaaatatttattagattcctattgtgttacatatttttacattttatttaaaatatgtattgccaggagcggtggctcacgcctgtaatcccagcactttaggaggctgaggcgggttaatcacctgaggtcaggagttcgagagcagcctgggcaacatggcaaaaccccgtccctactaaaactacaaaaattagctggatgtagtggctcacgcctgtaatccccagcactttggaaggccaaggcaggcagatcacctaaagtcactttggcaaakaatataaacagttcacagaaaaggacatacatatggccttttaaaaatataaaaagatgccaggcacagtggctcacgtctaatcccagcactttgggaggctgaggcaggcagatcacaaggtcaggagattgagaccatcctggctaacacagtgaaaccccatgtctactaaaaatacaaaaaattagctgggcatggtggcgggcgcctgtagtcccagctactcgggaggctgaggcaggacaatggtgtgaacctgggaggcagagctggcagtgagccgagattgcgccactgcactccagcgtggtcaacagagtgagactctgtctcaaaaaaaaaaaaaaagtattaaaaacaaatgcacttgtatactttaaaagatttaatttttattttatgtgacttatagctcaataaaacttatttttaaaatatgtgcatgatttcttttttttttctgtttcattttttaygggaaatccctccttaaacttaaggagaatgtaaacctaaatacagatatcaaggtgtctttattcatttaccgctgcttacattttggaagtatgttgattctgaggaaagaaatcaaggtggatctatcactaagaagtaaaattgatccataatatttatgtcatgtcatggyatttgaaaatgttatattactaagagcttcgatggcagtcattttttttttctttttcctttaaatagtcatgttgsaagcctctgcagagaacattttacagcaggacttttgccatgctatcaaagtgggagtgaaatatacccaacaaataattcagggcattcagcagttggtaaaagaaactggtgttaccaagaggacacctcagaagttatttaccccttcgccagagattgtgaaatatactcataagtaagaacatctgtgcaaatgaaaatatgaaattgtcatcagatttaatttcctcgtgggagagaaacttcccatggaagcactgcccatgcattacttcataaatagcacttttctgttttaagagtcattcccataaatatctgcttactcccttaaaaaggataagcccacatcactcttgtaagacctaactttgaatctcaaatgaaagagtgtgtttattggtcaagattcaggtaagcaccacatctctccacgtctaggaaaaagaataaaacgttaagatatttgaatatctaaggaaactgttggaattctcaaaaagaaatcagaggtaatcactgttacatgcccagtgcttagaacgttaggcagacactcagtaaatgtaaatgaatcactggaaaattattttatttgaaaaaattgaaaaggttaatactttcccttaatgtcagttgcacagccatgagttggaaattaaattaactctttctagcaaaagagtttcatgtgataatggagccaaaatgggtagaatgaagaaaggaagaggttaaaaagaatatatgaaaggtgaaattaattgaacaattaagragaaaagaacaggatactacatgtggtttcccctgggagggtgggagaaagaaatttgtgttctataccataaatagtaaacagattagcaatgataaatagcaatataaattttcaattctttctgaagtatttattaaagttttagctgattattattaaatatttcagttttgtttataatagaaactgcctcwtgtttccagatattattatgctaacatttattttctgcttaaatagacttgctatggagagactctatgcagtttttacagattacgagcatgacaaagtaggtatacctgagttttgtcttccataattgccctaggaatacatttttgtcataactcatgtaattttctttatgaatgctagtcctatttttattaaaaatctctaaatgaaaaactaacaaaagcctaattgtttctccattcttttgttttgttttgtttttgagacagagtctctctctgtcgcccaggctgrygtgcagtggcatgatctcagctcactgcaactttcgccttccagcgattctcatgcctcagcctcccaagtagctgggattacaggtgcacgccaccacactcagctatcttttgtatttttagtagagacggccatgttggccaggctggtctcaaactcctggcctcaagtgatctgcccaccttggccacccaaagttcttttctttttaatataagttttaggggagtgtacaaatgtatttgaatgaattaacatgtagtatttgtcataaatcaagaaccaattccaatattttaaagaatattaaagaaatcagagtaattcacaatgtgttcattgtataataattagaaaacagaaatattaaatgttgtcatgtatatgtaataactgaacctcaactttcttttaggtttccagagatgaagctgttaacaraataagattagatacggaggaacaactaaaaggtaaattttattttattttattttatttttttgctgagggcagctttaataaggcatggcctgactcttgcttcttgggattaaaggtcaaagaggaaaggcatcacatctgtaggaaaagaagaattcaaaggactttcaactttacagctgctgttccctasacctagaatgctctctcatagcaggtggtcttcttctaacccaaggttcaaatgccacctcttctccaaagcttccccgaactgttycggggaaagagaaagtcccctttgcacagaaccgctattactatgtattttttaattttaaaagcattaaaagaaataatagactttttttttttaactttagttgaagatctcaaataaatgttactctcattgcttctcagctttattttcaataaacttgtaataatgatagctcacaaggttactgctaaattaacttctgtgaatgtagctagcactacatttgatgcagagtaggtacctagtaaatgttgaatgtgaatgttcctgatcttttctgaatcaaactcctaccatacaagaaatgtaacctggtatcttatcatttgaaaacccaaatatattctttaaaattcttgagttcttgatctgtgaaattgcagtgttaataatacctggtttatggggattaaatgagtgaatcatttacatctgtgcctgccacaccgtaagtgttcaataaatgttaactgatgctattcttaatacctagtggartcataagatacagaacttaggtaatttagctctccagaaattattaagcaaaggatcttactgtataatatcaacctctggccaggcgcggtggctcacgcctgtaatcccagcactttgggcggccgaggcagrcagatcacgaggtcaagagatcgagaccatcctggctaatacggtgaaaccctgtctctactaaaaatacaaaaagttagccgggcgtggtggcgggcacctgtggtcccagctacccaggaggctgaggcaggagaatggcgtgaacccaggaggtggagcttgcagcgagtcgagatcgcgccactgcactccagcttgggcaacggagcgagactctgtctcaaaaaaataaataaataaataaaaataatagtaataataccaacctcacacaaactgaatataaatgaagtatgacatagtttttgttaatttttctaatagacaaatatactctcacatgaatatttattttaagataaaaaactggccaggcgtggtggctcatgcctgtaatcccagcactttgggaagccaaagtgggtggatcacttgagatcaggagttcaagaccagcctggccaatatggtgaaaccccatctctaccaaaaatacaaaaattaggcgggcatggtggcaggctcctgtaatcccagctacttgggaggctgaggcatgagaatcacttgaacctgttaggcagaggttgtagtgagctgagaccgccactgcactccagcctgggcaatagagcaagactccatctcaaaaaaaaaaaaaaaartgctgttagcattgatattaaggccattaattgtaactgtcattgaatatgtttagtcctttctcactacatttcatcctatttggtaagaaagaaattttatagcgaatattgtcttattttaaaagaatagtgactttttgtttgtattatacatagtagaatatcttcacgaccctctgggttgataggatattttaaacattttggtactgattgttttcctttccaagtacaactcagttaagcagaaaagatattaaagtctaatattaaaaattattcttttctgaagaagrtacaatctaatatatctttctgtgaccatttcttgtgttttggttactttgaagttatgtttaataaaccatacacatgagagaatagtacttaaaacttggcataaattaattgatagggtagaatagcttaacatctaaaccytaagctaaaaataaaataaaataaaaccataagcctttgaggctgacagatctttattcaggtcacagctgtatcagttactacctgtgtggtctcaggcagtttactccacctctttattttttatttatgtttttttttaaactcagtggttatctcttacacagtacttcacccctttaagcctcagttttttcttctgtagaatgggaatcataaaatttagttcataagttattatgaaagttaaaagcattaaaaaaccaataaagtgcctggctcatgaaagcatttgacaaatattagatagaaaacagtttgtagggatttctaatatatttttaaaatttttccccaatttgcagatttagattaaaggcaaaagagtgagggtgtctactcttaaaactgtcagttaggccgggcacagtggctcacgcctgtaatcccagcactttgggaggccaaggcaggcggatcacctgaggtcaggagttcgagcccagcctgaccaacgtggagaaaccccgtctctactaaagatacacaaattagccaggtgtgttggcacatgcctataatcccagctactagggaggctgaggcaggagaattgcttgaacccaggaggcgatggttgcggtgagctgagatcatgccattgcactctagcctgggcaacaagagcaaaactccgtctcaaaaaaaaaagactgtcagaccttttccataaaggctgactggattcttctggtaacataatagaaaagggaactgatgggccgggcgcattggctcacgcctgtaatcctagcactttgcgaggccaaggcagacagattgcctgacttcaggagttcaagagcagcctgggccacatggtaaaaccccgtctccactaaaatacaaaaaaattagccaggcatggtggtacacgcctgtagtcccagctactcagaatgctaaggcaggagaattgcttgaacccaggagacagaggttgcagtgagccaagattgcggcgttgcactccagcctggacaacagagtgagactttgtctccaaaagaaaagaaagaaagaaaagggaactgatttcaaagcactgtcattcagtcatttaggtagaaarcaaactaagttcacartaacaacacagttgtagtacttggtacttgatgtgtcacatttggttgagaacatttaatttatctactttgtttgcctgaggactaaacgttcagagtcatctcccttggttgattcccgtagttagttgatattatgctatgaactttagagaaatcctatctcctaaaaaagtaaaaatctttgttttggtttgtcttttttctatagaaaaatttccagaagccgatccatatgaaataatagaatccttcaatgttgttgcaaaggaagtttttagaagtattgttttgaatgaatacaaaaggtaaacatacccttttttgttgaaattgaagtatgcactgtctctgcaagttgccttgaaaatggaaacttgatcaaagaaagtttgttttttttcaagtgaacagtaaagaattataatatttgctatataaatggacacctattgaagaaaaagtacatgatatgtgaccatctgtcttgggcctggtgtataaagcggtgcctgccagccctgactgcacttcaggattacctgtagagttttttgtttgtttgttttttgtttttttttttgagacagagtctcgctctgtcacccaggctggagtgcaatctcggctcactgcaagctccgccttccgggttcacgtcattctcctgcctcagcctcccgagtagctgggactacaggtgcccaccaccatgcccagctaattttttgtatttttagtagagacggggtttcaccgtgttagccaggatggtctcgatctcctgacctcgtgatccgcctgcctcggactccaaaagtgctggaattataggcatgagccaccgcgcccggcctacctgtagagttttttaacaacacaggaatataggttcaacttcagacattctgattcagtgatattcaggatagtgctcaagtatctattattttttaaagttccacaggggattatgatacacaactgaggttgagaacttcctgggagagataaagacatgtgatttttctgtttccagcgttacttaatgtacttrtttcctatatcactataggtgcgatggtcgggatttgacttcacttaggaatgtaagttgtgaggtagatatgtttaaaacccttcatggatcagcattatttcaaagaggacaaacacaggtaatttatataaaaagctctaattatttgctaaattaagattgtttaattagatctaatagaagtacattagtagatgctgtaggttttgtcatatggtgtatattatttatttaaattaatatctggcggttcttgtttgttttgtttgagacaggttcttgtttgtcactcaggctccagtgcagtggcacaatcatagctcattgaaacctctaactcctggactcaggcgatcctcccacctcggcttcctgagtagctgggactacaggcgtgtgccactatgcctggttaattaaaaacttttttttgtagagacaaggtcttactatgttgcccaagctggtctcaaactcttggcctcaagcaatcctcctaccacagcctcctggtgttctgggatacaggcatgagccaccacgcctggcctttggtgtgttttttatgtaattttaacagtttttttgaggtataattgctgttcaataaactatgctgtttaaaatgtatgatttggtaacttttcacaagtatgcaactgagaaaccagcaagataatgaacaggccaggcatggtagctcactcttgtaattccagcactttgggaggcccaggagggaggattgcttgaggccaggagttcgaggttgcaataatctatggtcatgccattgcactccagcctggactaccaagccagaccctgtctcttaaaaaatttaaaaatgaaaaagataatgaacatatcagttacctccaagagtttcctcatgcctttttgtaatkccttcttcctgccccccacctcctcaggagactactgatctgcttttgtcactataaattagtttgcattttctagaattatctggtatttctgttgtatctttcttttaatattgggtatacaaaattgagtaactcagactctagtttatggcatattgtgattgttgacctgttcaaggccctcatttgttttctccatttagcctgtacagttctattctttttctattctttattctttacataggcacccactcttgtatttaacaggtagccttctggttctccttcttttcgtttattaatatttacctacatctgtattcattgttctgtgtaccatattatgctttatactcctttcccacattaattgtttctttaattctatcaatctgataggcaccaagtagtaactttttgctttaattttattttcctgattactagtgaggctcagcattatttatataacagccagtcaacatggtcactgcataaaccatgccctggggaactgcacacctccagggcactatttccacatgaatgttgtcccctagagttgtgcagtgtggtggccttgcctcaggtttgcccttttatgaattttctgtccatatcctttggccagtttttctttttttaatatggtttactgtgttttacctgctattttgtagtaatttctgaagtgttttaaatattaattccttttggtaacaaactttatatatatatgtctccttctttatttattgccttttaactttgcctgtggtagtctgctatgtttagagtaaacctgaaaacttagttctgatataaattcttctgtacctcaaagtcacaaagttactcacctactttttctattagctttctagttttagctgtcgaatgtagaccattagtcgatctttgaatttattcctacacgttgtatgaaaggaaracctccatagtgagccaattayacattatttactaatactttatttttctcaatgacttgtgatgtcaccatatgatagtcaaagtttataaatgcatgttaaactatatccttttkcattgttacgtgaattttctgggccactgtcaaactattttaattattatgatttaggggtatattttaatatctgagaagcaagtcatcttccctgtttgttcaatcccctcaaaattatcttaaaatttagatacatttgttcctttatttgaattttagtattatatcaagttctcaaaatatccttctaggatttataattataattatactaaatttttatattaatctgagagaagaatcatacttttacaatttaagttatagtctacaatgaatagagtcagtgtcacctttgattcaggttttcttttatgctctttagtcaagtttttaaaatgcctttattaagatgttctgcatacttttgttatccattgtgacaatctctggctttgtaactgtagtacttagtccattcatgttaaatttaatcattgatgtgattgaatttaccgtcattttattatttgtttttcttttgcccttctgttttttgtttctctattttttactttcagccttctttttgaatgaattgaattgtttttagaattttaatttaatttgcctatttattttttagctgtacttctgagttattttccagtgattactatagaaataacagtatacatccataacttctcacaactttttatttatatattgtaaaaaatttttgtagagtcagggtttcgccatattgcccaggctagtcttgaattcccgggctcccgcagtcctcctaccttcgcctcccaaggtgctggtattacaggcataagaccctcacagtctttttagaattaattttgtaccacttaacataaaatgaagaaacttcgcaaccatttaggtgcatttcctgccccttctatcctttatattgcagttgtcttatcagttacatctacatgtgtcataaacccccacagggtggtgttataactttcatacaatcatgtattttaaagaagtaataagaaaaagataggcttttatattggcccacatatttaccatttctggtgctttttattcctttctgaagatccaagtatggatccagtatcatttcccttcattctgacaagacttcctttaatatcatcctatgagttttctttttttgggatggagtctccttctgtcgcccaggctggagtgcagtggtgtgatctcggctcacggcaagctccgcctcctgggttcatgcccctgccattctcctgcctcagcctcccaagtagctgggactataggcggctgccaccacgcccggctaattttttttttgtattttttagtagagacggggtttcaccatgttagccaggatggtctctatctcctgacctcgtgattcacctgcctcagcctcctaaagtgctgggattacaggcatgagccaccgcacccagccgtttcagtgttttttgttctccatgtttttctgatgaaaaggacccattcaaatcattgttccttatctattatttttttcatgtgggtgctttcaagatttgcacctcatctttggttttcagcattatgattgaaaggtgtggtttcctttgagtttatcctgctaaaagtgtcctgagcctaaatctgtacattgatgtctttcaccaaacttgagaattttcatcgattatttcttcaaatattttttcatgcctcattctctctcttcttctagaattgcaactgcacatatgttatccttttgatactgtcccataggtcactgcaactatgttctctttcctctcttctgcaaattgggcaatttctgttcattcatcttcatgctcactgactcttgccatctcccctccattatgagatattaaagttttcaattctagaatttccacttattcttttttatgtcctttgagtatagttataatagctgttaaaaatcttttgtcgccgggcgtggtggctcacgcctgtaatcccagcactttgggaggccaaggcagatggatcacgaggtcaggagatcgagaccatactggctaacacagtgaaaccccatctctactaaaaatacaaaaaattagctgggcgtggtggcacgcacctgtagtcccagctacttactcaggaggctgaggtaggagaatcgtctgaacccaggagatggaggttgcagtgagccgagatcgtgccactgtactccagcctgggtgacagagtgagattccgtctccaaaaaaaaaaaaaaatcttttgtctgctaatccaccatcttaatcaactcagaatcagcctccattcctggtctttattcttgagaatgggccctgtttcctgtttcattgtaggttgttttctggatgttgtgaatgatacattgtagagtgtytggattatgttatgtctctacaaagaagactgattttcttaatttatttttcttttcttctttttctgagacagagtctcgctctgttgcccaggctggagtgcagtggtgtcatcttggctcactgcaacctcgcctgttggattcgagctattcttctgcctcagcctcccaagcagctgggactacaggcacatgccaccatgcycagctaatttttgtatttttagtagagacagggtttcaccgtatcggccaggctgatctcgaattcctgaccttgtgatctgcccgcctcagcctcccaaagtgctgggattacaggtgtgggccaccacgcctggcctgatttttttttaattttaagcaggcagttgtattggctgaacctgtattaaggcttcctcagygtactctcctacatagttcttaaaaacattgctttctcttcctgccttccttccccagcactcctagagcagtgctttacatatgtagtctatgtgatgttagaactttggattattgaggtttacacatagtatgaatatttatagaataaataagtgtttaatgcagttagtagcatggcaagctttgtgtaggatgtacttatctcatttttttaagagttagttggattcttcaagtatttttagttttcatctttgtggttagtatattaaagcctgaggaattctttttcttttttaggtgctttgtaccgttacatttgattcattagaatctggtattaagtcagatcaagttataacagctataaagtaagttatgtttttaagatgtttgttaygttttatgatgttctattatataattraagcttatgtggtatattattaattattgttactttttttaacctgtgtttttgtacttcatttttctgtttacatcatcatgatttcaaaggattttgtgtgtgtgctagattgtcttctaaatcactgatttggaacaaatattagtaaagcatttaattctttaatgtgagtatatttagtttgttctctgtctctagaatgatttcttaggacaggcttccttggtaatcttgaatggattggtttttctattagaaacgagagcaaatgaatacacgaaagctcccattgctgaaaataatctggaggctgttaatgaaaaacctcgttaatgaaaagccttgtcgaatcccaagccacgttgtgattttgtgttcagaaatacttggctgtcctcctctgcccctaaaaagtcaacwgtaaaatcatgctaatcaattccgatgataagaatctttattgcaggccaaatcaattctgatgataagaatctttattgcaggccgggcgtggtggctcacgcctggcctgtaatcccagcacttgggaggccgaggtgggtggatcctgaagtcaggagaccaagactatcctggctaaaacggtgaaattccgtcyctactgaaaatgcaaaaattagctgggcgtgatggtgggcacctgtagtcccagctactcgggaagctgaggcaggagaatggcgtgaacccaggaggtggaggttgcagtgagatcacaccactgcgctccagcctggacgacagagcgagactctgtctcaaaaaaaaaaaaaaaaaaaaaaaagaatctctattgcagtcctcaccagcattattgcatagagtcttgactctcatagccagttctttattttcctcagtgcctagtagggctacttcctgttcctggttaagggtctcagaagaccacaaggctcggccctccttttcctgatgcccaactgatgaggataattcctagtagccactgtaattgttttccatgtatctgatagaatcgacagtgcagctgtgtgtgtgaaggtggaatgcagaacactgggcttggtcagggtacctccatatattctagtcttaggtctataacctgtgtaaataaaggggcacacatcatcactcagccacactggcctttggtttctatttcttatcaaatgaactgggccagtgacctgctataatcctctctggctcaccaaatctgtgattcctttagtcctctgaaggagtttggtttttagatttctttttccaaagctacmgtttatgatcatgcagattctgccccatcccaggactttttcttcgtttcacatattgactgggagaagcattgtagctctgagatttaactaacgtgggtatagcatttaggattctctcagtagtcattaatgcttaaaaatacatctattgtcttagtgttcaaatctggatatttaaggacttatatttaaagtaaaattggtttcctaaatctgtacaattcattcataagccccagaagaaaatatcatctcacaatcatccttctaattaattctttggttttcagtttcagtctgatttttcattaacacctagttcttttgtaaaatccccttaaatctgttttagttgtgttttgaaataaatatgttttttccctatgatgtttttaatattatgccttttatttttagtgggataaaagataaaaatttcatgctgcactacgaggtaaggtgaatttttttcctcaaaattttattaataaattaataaatttttgtgagacgaggtctcaccctgttgtccaggctggagtggagtggtgcagtctcagctcactgcagcctctccctcccaggctcaagacatcctcccgcctcagcctcccaagtagctgggattacaggcttgtgcaaccacaattggctaatttttctatttttttctagagatggggttttgccatgttgctcaggctggaacattttatttttaaaaacttccaggatacagtaaagttgaaagaactttacagtgactatccatatatccactacctgggttttaccaataatattttacttttctagttttatcatatatctattaaggtcaatttggggctactattttattgcttacagaaggcatggcaagctttgtgtagaatgataagtagagagagatgtaagtagtatttttagagagtatttagcactctctaaagtactactttagaaagataagagataagtactttagagagataagtggtatttttctaatcaacaacttcctgttctaagtcatacgtaaaagttaaagtatagcagacaatatcgttttaggttaaaaaaaaaaaagtcatgcctgtatacacgtctgtcaaacaaaagtagagttttttaaatacctcarctcccaaatcaccttctgtttgctcattgaaatgttcatatttatactcagttgattagtagtaaaagatgagacgtttagtattaagttactttatatgagatgattatagataattgagtttgtgattgactttattcacaacaaatcctaagggaccagacctaatataaagtacttttaattttattatttgaagaatgtacatggagagcagggcatggtagctcatacctgtaatcccagcactttgggaggctgaggagggaggattgctgagcccagaaattcaagaccagcttgggcaacatagtgagatcctgtctctacaagaagatctaaaaattagccaagcatggtggcatgtgcctatagtcccagctactcgggaggctgagatgggaggattgcttgagcccaggaggctgagaatgcagcaagccattatcactccgccgcacttcagcctgggcaacagagtgagaccctgtctcaaaaaataaaaagaaaaagaatacaacatgagagacttatgtaaagtagcaagtcatttcgtttttgtgtaacccttgttggctgcccagagtctcagcatttcactcttgctgaatctgctgtaatcaatagagaacatttttttgtagaaattatatgctacagaatatccataaacatcaagattcatacaggtcttgaatcccttataaatatcctgttctggatatagcctggtgctacagaagccagaaaggaattataattgagtaaagcaggttctttgtcatgagctggagagcacatggcagtcttaaaagggcagctgtgcaaaatggaggtctagctgattattgggtaagggggttggggagggagctggagaaggatatgggccattattgccatattttatttttgtgaatctctttattataaaataaagcataggtactgaaaactgtataaaacaaaggatggcttaatacatttttataaggcaaatatccttgtaaccaccacccaagtcaggaaatttaacattgccagccacctcaaaagcccctccatgttcttcatcccaatctcaatacccgtcgtctcttaaaagtaggtaactactctcctaagttttacagtaatcatcttggatttcctggctccatttttagatactatagtttagttttgtttttttctttaaaacatttggtatttccttttttgttttagtttatttgagacagagtctcactctgtcactcaggctggagtgcagtggcaccatcttggctcactgcaacctccatctcccaggcttaagtgatcctcctgcctcagtcccccaagtagctgggactacaggcaccaccacaccccgctaatttttagattttttacaaaatggggttttgccatgttgtccaggctggtctcaaactcctgggctcaagcagtctgcctgcctcagcctcccaaagtgctgggattacagacataagccactatgcccggcctgatayttctttaagtctttttaaatctatacatttctcctccattacattcttttttttttttttttttttttttttttttttttttttgcagtctatctattgaagccccatagccatttgacttatagtctcccacagtctgggtgttgctgattgtacactcatggggcaattcaacatgttcctcccccctctctatttcctgcaaattgaccgctagatccagaggtttaatcagattcctgctccatccactgcatttaagagcggtggctcatgcctgtaatcccagcactttgggaggccgaggcgggcggatcacctgaggtcaggagttcaagaccagcctgaccaacatggtgaaactctgtcctactaaaagtacaaaattagctgggcatggtggtgcatgcctgtaatcccagctacttgggaggctgaggcaggagaatcgcttgaacccagaagcrgaggttgcagtgagccgagattgcaccattgcacgccagcctgggcaacaagagcagaactctgtcttaaaaaaaaagaaaaaacaaaaaaaaaattcttgttaatctggaattacagatatttgggggaattttttttttctgttttaaaaaaagggtctctgttccacaggctgaagtgcagtggtgcagtctcggcttactgcaacctccacctcctgggttcaagcaattcttgtgcctcarcctcatgagtagctgggattacaggcatgcgccaccacgccctgctgatttttctatttttagtagatacagggtctcaccatgttggccaggctagtttcaaactcctgwgctcaagtgagctgcctgccttggcctcccaaagtgctgggattacaggcatgagccactgcgcccggcctgaaattacagatttttatgggaagtcttcctattgtcaaatgatcacaactaattcatattccttcaaggtaacatatccaccaaataaaacagtttgcaaccactggctaaaataaaacccttatggaaaagagctgtttcctccatacatttttgtcattgtgttttgcttgagaaatacttcaaaatatgcaactttcccattcatgtattttgtttcatatctgaaaaagttagtggagagagataactctaaaaagtatcagtgtaaattaaatttcaatttagtgaaataaatgtgggctttgctatggaaaaaaatctgtgattcttcaatgtgtactttttaaatatgtacatatttttacttattacaaaaatataacgttattgttaataatttaaatgtaatggaaatttatggtgtaaatccccatacccatccagttcccacatcctaatccatktacacacttgaaatagctacttttaaccatttggtatgtatgttaaatttatatcatacgttttctgtatatttatgaatgtacttttttaaaaaacaaaaatgagattctactgttctataagttgttttattattttggtaatataacttggacatctttctatgtcaattgtatatgtgtgtttgtgtttttttttttttaagtttcctccttatgcaactaatgaaattggcaaagtcactggtttaaatagaagagaacttgggcatggtaagtacaggtctgtaaacttaatacggtattcttacagagacttaatacattttttacttattgttttctattctaatttaggtgctcttgctgagaaagctttgtatcctgttattcccmgagattttcctttcaccataagagttacatctgaagtcctagagtcaaatggtatggtattgaaatacttctttcatagtagaaaagaccatattccctattctattattaagttttcaaatgtaatgttacattttgtttattactacagaacccaagtttgttgcaagagaaaaatgtattgagttaatcaaatacttgtcttaatctctgttcttagctaatgagttgttttgaaagcaatataaaacaaatgtttttctttatctgttatagtagatccagtttggcttgtttctttatttttacaaacaaaccacagaacaaggttaacagagagaggaagggccaaaatagagtgatcattaggcaggagatacctgtcacatatccacatgaataataagtgtacatcacagagggagtctaggccaagaggtcacatttaaataaaaaatttgtccatgggtcaaggtacggtgcagtcattaaaggcagaaaggtcatggagttcttaaaggtgtaacagacgtaaatcagatagtcacagattttgaggaaaaaataccaaggtaaactcagaatttaaactaaagactttgtggttctctactgggtgtgactaaattaatgggcttatgagagtgagagagccaaagccctatatctttaactacttctgataagcaagacaaaagatatgcactaggaagtctattagaatatctgtagcaatactatgcaatagaactttttgtgataggctgggcttggtggctcacacctgtaatcccagcactttgggaggccaaggcgggtggatcayaaggtccaaagggtctaacatggtgaaactctgtctgtactaaaaatacaaaaaattagctgggcgtggtggcaggctgagactccatctcaaaaaataatagtaaaataaaactttttgtgatgatagaaatcctctttatctgtcctatctagttgaagaattaaatttattttaattgatttaactttaagtcaccacttatggctaatgtctaccatattggaccttgcagccccatagtttatagcttaaaagaccttgccttagttgcttttaaaaagaagagactattgaatatttgtattgtaactgaatatttataaggaaataaccaatagtaacacttttctacattaaaaaaatcagtttaatataaagcagttatttttctttctatagggtcatcttctatggcatctgcatgtggcggaagtttagcattaatggattcaggtaaaagaattatgtctcaaaactgctgatattgctcatgcctgtaatcccaggcatgagccttgggaggccaaggcaggaggctcacttgaggctgggagttcaagaccagcctgggcaacatagcaagacctcatctctacaaaaaagattaaaaaaaaatgctaaccttttatacacacctgttagtataaaatataagatttctttaaatttggrttttagtaaaactcaaagtcagattacagatggccaaatcaagccagaggcaagatggctgaaaagtagagcttcagatatccagatatctgctggaattcttatttttagctaaaagcagtacactgaaaaatttttatttgcattggtgacccagtaaactttatttccttccaaaaggtagagagctccagaattgattccaatcaccaaggaagttttgattagtaagtactattaggaatcataagagaaagcaactgtaatctttcagtcgrtttatacaagccaagagaacaatgccactcaggcgtgtacacacaattttaggaaggcggactacaaatgtttcattataatccccaggtctgaaacgccaaaaacgaaagcattatgctaggagattttttttttttttttttttgagacagagtctcgctctgttgtccaggctgaagtgcagtggtgcagtctcggctcactgcawcctccgcctcccaggttcaagtgattcttctgcctcagcctcctgagtagctggaattacaggtgcgtgctrccacgcctggctaatttttgtatttttagtcgagacggggtttcaccatattggccaggctgacctcgaactcctgacctygtgatccacccaccttgccctcccaaagtgctgggattacaggcatgagccaccacacctggccgctaggagattcttaaaaccaattcgtgccaaactgtcatgaatgctgctattcgagaagaaagagagaaggaacctaaagacactaaagaggccacaaaaggatttctctgataacttaacacatttacagtactggcatgaaagatagaaaagagggccgtgaataacaaaggattaaatgaaaacatggtttgaatatataataatattatctagaaaaattgaaactaaaaacaggccaaagcaaaaaatgcaaaaggtacttttgtaatttattcaataaaggaaaacataatctgatatttaaggtagctggtaaaatactgctgctactattttcatcttcattctttcactctacaaatctttactttgtggcacctatgtgccaagcactgatctaagttgttaggacatggtgatgaacaaaacagtcttagacttcatggcacttgtgtttctcagtcttccaaatctcatactggaaaacactgaacaaatcttgaaaaaagtaaactgaaaaataaaagatgacatcataggggagtctttacctgccatttttaaatgaattcagatcttttggtctagacaaaaactcatccttgactataatgagaacttcaggattagattactgaagtatgatggcagtcattgagaaatcgtggagactagtatcccaaggacagaaaacgttcttattattggaagagaagaaaagtattttctataaagtataacccaatgaacttgatcgtgaccctcaacaagactcttaagaacttaaaaaaagaatggtttataagtagtttagaaaggaaaggggccaggcacagtggctcattcctgtaattgcagcactttgggagcctgaggtgggtggatcacttgaggtcaggagtttgaggcctgcctggccaacatrgtgaaaccccgtctctactaaaaatacaaaaattagccgggtgtggtggcccacgcctgtaatcccagctacttgggaggctgagtcaagagaatcactttaacccaggaggcggaggctgcagtgagccaagatsgtgccactgcactccagcctgggtaacagagtgactctgtctcaagaaaacaaaaaaggaaagggactacagaaagaagccagaagggacttctctaaaataagtcatgccatagttaattcactttctgttttgaagaaattactgcatttgcagtagagggtattgctgttggtgtgatatatctataattcagctttacggtttatgatatctttatgatatcttgtgtaaatgatgcagaaatttagactaaataataggtgcaccattcatactggttaagggatgagcaaagggactgcttaatctgatcaacaggtcagagaatgatctcaagttgaagacgtgaggatgcttatttcagccctgtctctttcaatgttgacttgactgagaacactggcctgccagtaaaaatactgccaataaaaatactgattaaaaggaatgggtgactgacaaaattgagcaggataaaaaaatatggagcttaatagtttaaaaattaaatttgaagcgttaaagccaaaaacctcaaaaaaattaaatttgataagaatgaatgtcaagtcctgtgggatgggccgatacaaggtatgcagttcaattcaaatatgaatttgaattgctagagtagggcttgccctgccctaagtcaggcactgtcctatgccccagggatgcaaattgtacccagtttttgaaaaagcttaaaggtttgaaaacaaaaagatactaatagattgaagaggtaataatacaaatatgtgtaagggtgattgttgaactaggctgagcataattggctgagagagactgctacatttcatctgattttaaaggctgagtaattgttgactgggcatattaggagcagggcctgtatttcacatgaaaggaccagcatgtgcaaagttaagaagttacagtgtagtgtgtttcaggaatctactcgaaagaggtgttaaggtaataaagtagaaccatatgttgaaggttattgttttttttttttttttttgactttcctttttatctttgtcttctctttatttcctagttgtttctagtcagaggaaggatagctttatacagaaataggattttttttttttaawtttttttttttttttaaattgatcattcttgggtgtttctcacagagggggatttggcagggtcacaggacaatagtggagggaaggtcagcagataaacaagtgaacaaaggtctctggttttcctaggcagaggaccctgcggccttccgcagtgtttgtgtccctgggtacttgagattagggagtggtgatgactcttaaggagcatgctgccttcaagcgtctgtttaacaaagcacatcttgcaccgcccttaatctattcaaccctgagtgcacacagcacatgtttcagagagcacagggttgggggtaaggtcacagatcaacaggatcccaaggcagaagaatttttcttagtacagaacaaaatgaaaagtctcccacgtctacctctttctacacagacacggcaaccatccgatttctcaatcttttccccacctttcccccctttctattccacaaaaccgccattgtcatcatggcccgttctcaatgagctgttgggcacacctcccagacggggtggtggccgggcagaggggctcctcacttcccagtaggggcggccgggcagaggcgcccctcacctcccagacggggcggctggccgggcagaggggctcctcacttcccagtaggggcggccgggcagaggcgcccctcacctcccggacggggcggctggctgggcgggggggctgacccccccacctccctcctggacggggcggccggccaggcagaggggctcctcacttcccagtaggggcggccgggcagaggcgcccctcacctcccggacggggcggctggccgggcggggggctgatccccccacctccctcccggacggggcggctggccgggcggggggctgacccccccacctccctgccggacgaggtggctgccgggcagagacgctcctcacttcccagacggggtggctgctgggcggaggggcttctcacttctcagacggcgcggctgccgggcggaggggctcctcacttctcagactgggcggttgccgggcggagggtctcctcacttctcagacggggcggccgggcagagacgctcctcacatcccggacggggcggcagggcagaggtgctccccacatctcagacgatgggcggccgggcagagacgctcctcacttcccagatgggatggcggccgggaagaggcgctcctcacttcctagacggggtggcggccgggcagaggctgcaatctcggcactttgggaggccaaggcaggctgctgggaggtgaaggttgtagcgagctgagatcacgccactgcactccagcctgggcaccattgagcatggagtgaacgagactccgtctgcaatcccggcacctcaggatgccgaggctagcggatcactcgcagttaggagctggagaccagcccagccaacacagcgaaaccccgtctccaccaaaaaaatacgaaaaccagtcaggcgtggcggcgcgcrcctgcratcgcaggcagtcggcaggctgaggcaggagaatcaggcagcagtaccgtccagcttcagctcrgcatcagagggaaaccatggagagagggagagggagaccgtgggtagaggtagaggtagaggtagaggtagaggtggagagagggagagagggcaggattttttttaagtaagaattctttaccaatccttctttccycaacataaaatctcctatttgaagtggagtttgaggtagggactcgagaggcagtgcctcaagaaagccacacattgtacaatctgaaggttattgttacrctaaggagtttggacttaaagccagcatttttccaattcagtattccatggaatagtgttccacaggacattgattattgtataccatgaaaaagtttattctgttctaaagttaagtttcagcagggttaagcaggtttatttaatatggattaaatagactttaataagctaatccgaatactgactctctaggaataggacatgtaatatttttccaaatttatttgaccacagaatatgtacaaaaatttcctgaaagtaggcaatggggaacttgaaggattttatggaaaacagtggcatgatttgaatctgcttttgttttttccaaacagtttttcccagcttaagtgatgaatagccctgcggaatgagatgggagagactaagaagcaaagagagaaagtaaaatctgggaagccagacagggagattgttgccagggcaagaaatgatatggactcagactaaaaagttacaataggtattttaatatttagggtaaaggacagctttctaaaaaaataaacagatctttgtgacttgatgggatataggaaatgaggaaagaaatgttgattctggcatgagtgtcttagttgctttcaaccaaagaatgcaggaggaaaaggattttttgacagtgattcaattttgaacatatatgtatttctttcatcatcatcattattattatttatagagatgaggtctcaatatattgcccaggctggtctcaaattcctgagttcaagtgatcctcccatcttggcctgccaaagcgttgggattacaagcatgagccactgggcctggctcaattttgaatatatatttaaggtgctttggggacatttagctggagatgtctgacagggagtttactaatacaggtccagggtttggcacagatagctggacaggagggatagatttttaagtcatcaacattatagatggtggttaaaatcgtaagtatagatgaggttgcttagagaaaatgaaatgagatccacactcctttataccaaagtaaattccaagtgatcaaaacttaaacatttttaaacaaatgaaagatggtaggttttatcaaaatcttggagaagaaaagctctgctaagcaaaacccagaaaccatgattacgtaaactaaaaatcctacacagaaaactaatgaccataagcaaagtcaacgaactaggaaataaaatattttatttatatgttattaaacataatattttatctttacattttaataaagctctgtccatattgaaagaaaatcagtaataaaaagactgccaaccaagtagaaaagtgttgaaggccatgaacagggagttctcaaaataagacatataaataggtttatgaacatgaaatagttttcaacctcagtcataaaaaacaagtcagatttaaaataaccattttttacactttaaattgagaaaaatcaaaagatttgacaagaattaataagaatatagagtagcatataccttcttacaccactggtaaaagtttaaaatgctatgtctttagaaggcagtttgacagtctaacaaacgtaaatgcacataccttttgactcagcaatcgcacttctgtgtgtgacttgtaaaacatacagggagtactaaaactattcaaaggaataaagtagagctttgtgtggtggtatgtgtcaatatccaagacatgttattaagtgaaaaaggcaaggtgcagaacagtaaatgcatacagtctgccgccacgagtaaagaaaacaaaagattatatttacatttatacttgtrcacagaaattttctaggaggatacactaatgttagctgccatggggaggtaaactgaggagttcaggctggaagaatttaccaaatagatgcttactttccaacaaaaagaaaataagacacctgaagcaaaaaagcaaaccaacggataatttaaaagttataaagtttgctattgttagagaagtttttgctggatatagtacttgtttacattgttttagggaactttattatatgttcaaaaacaaacgaagtagtcagatgacctcttaagacttccaactcagcttcggtgattgtcaatttaggcaacaatatccacttacattaaaagtaaatgtctgctgggcgcggtggctcacgcttgtaatcccagcgctttgggaggctgaggctggcagatcacctgaggtcaggagttcaagaccaacagggccaacatggttgaaaccccatstccactaaaaatacaagcaaattagctaggcrtgttggcgggtgcctataatcccagctataggggaggctgaggtgggaggattgcttgaacccaggaagcagaggctacagtgagccaagatcatgccactgcactccagtctgggcaacagaccgagactccctctcaaaaaaaaaaaaaaattgatagataaatatttgttttaggctcatgtacacattacccacagttgttctttttcccaattataggggttccaatttcatctgctgttgcaggcgtagcaataggattggtcaccaaaaccgatcctgagaagggtgaaatagaagattatcgtttgctgacagatattttggcaagtatattctcggtttcaaatatttaataatgaagactaaaaataaataaataaaaattaaaagataaaaacaaataatggtgaagactatatgtactttgcacctagcgtatgcttagaagaatgctagtatttgaagaacaggtrcttgttcttcccttcctcctctgcatgttcaccttgtatcttataggatatgaatttaaaatagatattatattaatagtaataggccaggcacagtgactcatgcctgtaatcccagcactttgggaagtcaggagttccagaccagtctggctaatgtggcaaaactccatctctactaaaaatacaaaaattagcctgggcatggtggcacacacctgtaatcccatctacttggcaggctgaggcagaattgcttgaacccgggaggcagaggttgcagtgagccaagatcgtgccactgcactccatcctgggcaacagagcaagactgtgtctcaaaataagtaaaataaaataaaataaaatgattactttaaaaaaatagtaatacttacccttaagtattgcagtaatacttacacagtgtaagtattcataatgactcactttaggatgagcataaattcattctcaggcatttatgagggaaaggaatgatctaaaaataaaatgatgtttctggtgaaaataattgtagcttaaaaagtcacaaattggaagtggtagttaatgtagaaaacattgctttgtgtttggacttaggatatggtttacttctaaagctgttttttgaaatgtttctacagtgaatatgttgacttttgtttttgtttaaaactatgtcataactttttaaattcctgaagggaattgaagattacaatggtgacatggacttcaaaatagctggcactaataaaggaataactgcattacaggtatttttaaaacccattttgtttcatttttgtaacatttaaataatgccatgagtcaatatttatataattgtttgacttttccatattaggctgatattaaattacctggaataccaataaaaattgtgatggaggctattcaacaagcttcaggtgagctastgtgcttgattctcccttcattcttttccactttgctaatgggaactatagttctcattaggcttattataaaatattgctttwaaaagtggaatttcatataacttagatcaagaagtactggccaggtgtggtggctcatgtctgtaatcccagcactttgagaggcygaggcaggcagatcacttcaggtcaggagttcgagaccagcctggccaacatggtgaaaccctgtctctactaaaagtacaaaaattagccgggcatggtggtgcatacctgtaatcccagctactcaggaggctgagacaagagaatcgcttgagcccaggaggcagaggttacagtgagccgagatcatgccattgcgcgccagcctgggtgacagagggaaaatgtctcaaaaaaaaagaagtactaagtagccaggcatggcatggtggctcatcctagcactttgggaggccaaggcaggaagattgcttgagccccaggagttcaagaccagcctgggcaacgtagtgagatcccatatctattttaaaaaaagaagaagcacaactaagtttttgggacacatgaatacacgccaaagtgggttaccagtgaaatttcaatttttacaaattaaacaactctatttaagatgggatttttggagaagagaatatgagtgaattttcaaggtaatagggatgtggaaagcttcaattattaagctacagggtttagattgtataccgtgaaaactaagagtacagtatttcagatcatatttgttttatgtagttataatttttgtgtttttctcttctagtggcaaaaaaggagatattacagatcatgaacaaaactatttcaaaacctcgagcatctagaaaagaaaatggacctgttgtaggtaatacattaaaattttagtgatcggctgggcgcggtggctcacgcctgtaatcccagcactttgggaggccgaggcgagcggatcacaaggtcaggagatcgagaccatcctggctaacacggtgaaaccctgtctctactaaaaaatacaaaaaattagccgggcgtggtggcgggcgcctgtagtcccagctactcgggaggctgaggcaggagaatggcrtgaacccgggaggcggagcttgcagtgagccgagatcgcgccactgcactccagcctgggcgacaaagtgagactccgtctcaaaaaaaaaaaaaaaaaaattttagtgatcatggtaagataaacattaatatatgaatgaatattactgcttttaaattgtttttacccagtgcacaaaacgaaaatattttaaatacttttgtagttaaaatgctttaaattttagggaatattctttaacagttttcagtaattttaatcatctacttttctgttttatagtaaaatatttttacatgtgtctaggtcaaaaaaaaaaaaaatctcaagtgaccatggcatgttttaggttcatgtatgtagttgaattgtttatatatttgtctgtattacgttccagaaactgttcaggttccattatcaaaacgagcaaaatttgttggacctggtggctataacttaaaaaaacttcaggctgaaacaggtaagagttgtatgaagtttggggttttttaattaaatgctagaccataaaagtttgctatttcatctctagtatgttgctttaaatatatatttatttgagaaatgagagaaagaccaggagaaaaggatatgacgtgtcttgactgtgagttttctgtgtgcctattaataaattagcaaatggtcattcttaactaaattcaagaaggattacaaagaattcatcaggacttttttgcaacattttatagttgaacatctagaataatttttagtttttaactttagaggaattattacttagttatttctttttattctgctactttcacttagttttattttaactcttttatttaaagagtatataaaaaaaagctttaatttatttttcctgaagcaatgtttgaattacctcgtacttcaaggtttgaggttactgcaagagagtgagaagcactgtcaccttagccatttgctaacaytgagaaactgatgtgattttgtcccttattcatttattcacccctcgtaagagtaagcgggagaaagaaaaaaagtaaggaaagggttctattatagtttctactcgtaattaagagagcagaaccagactctccaaaatttgtatagatatatttgatttcactagatggtgaatttcaagaaatcaagcatattggctcaccattgtatccccagggcctacctagtataatgccaggtacctagcaagtatgcagagtgtatttgttgatgaatgaattccttcattcctaaagtaatgattaaatacagcataactccacccagctactaataggtccctcctattctcacatctatttttaagacgagtttccactggaatgagcaagttaacttttttttttttgagatggggccttgctctgtcacccagactggagtgcagtacacaaycacagctaactccagccttgacccctgggatcaagtgatcctcccgactgtgagtcccaagtaggtgggcacatgctaccaggtccagctaatttttgaatttattttttgtagtaacaggctctccctrtgttgcccaggctggccttgaactcctgagctcaagtgatcctcccacctcagccccccagagtgctgggattacagatgtgacccactatgcccagccaagttaactttaatatgttacattttgtttttaaaaggtgtaactattagtcaggtggatgaagaaacgttttctgtatttgcaccaacacccagtgctatgcatgaggcaagagacttcattactgaaatctgcaaggatgatgtaagtatagatcatattaattacgtatcatatagctatatttgttttttctactttttgttgatgttttctttatgaatcttatggcttattttgcacttacagcaggagcagcaattagaatttggagcagtatataccgccacaataactgaaatcaggtaatatcaagtaatatactatgctgagcattttcctttctttagagacagggtctcaccctgccacccacagtgggatacagtggtgccattgtacctcacagctgccttgaactcctgggatcaggcagttctcccacctcagcctcctatttaggactacaagcacacaccaccacacgtggctgattttttaatttttttgtaaagacatggtctcactatgttgcccaggttggtcttaaactcctggcctcaagccatcctcctgcctcagcctcccaaagtgccaggattacaggcatgagccaccgtgcccagccctgttttggtttttaacagattcctattataatcccaatttaattttacatttactttgaaatcataaggtgtttagattacatgccaattgccatataatcattattttttaaggtatagtatattttgttttctatatcattttataaaattaaagtagcagttctgtggttctaattatgataggttctcttaactgaattcttttttttttttttttttttttttgggacagagtctcgctctgtcacccaggctggagtgcagtggtgcgatctcagctcactgcaagctctgcctcccgggttcacgccattctgcctcatcctccccggtagctgggactgcaggtgcccgccaccacgcctagctaattattttttgtatttttagtagagacggggttttaccttgttagccaggatggtctcgatctcctgaccttgtgatccgcccccctcggcctcccaaagtactgggattacaggcttgagccaccgcgcccggccaactgaattctttaaccaaattttctactagtaattggtgaaaccccaaattaattttcccagtaaatattaaataggcccaaaatagacttagcaatatttctttatttctttttttttcttttgatggcttattttaaacatatctgaatgcttaattggcacatatttttaaatccaatttcggctgtgcatggtggctcacgcctgtaatcccagctctttgggaggccaaggcaggtggatcaggaagtggggggttcgagagcagcctgaccaacatggtgaaaccccatgtctactaaaaatacaaaagttagccaggcatggtggtgcatgcctgtaatcccagctactcaggaggctgaggcaggagaatcgcttgaagccgggaggcagaggttgcagtgagatgagatcgcaccactgcactccagcctgggcgacagagcgagactccatctcaaaaaaaaaaaaagccaatttcagtctcmaagcattttttttgaccagctagaagagcttgtttttttaggataagaaaatccctcttttaagaaaaaggaaattatcaaatgtagcaaaaatgttcaaagctatttgaaataaaataaaaggcaaggagataatttgtttaatattgcaggtgaaaaataagaaatgggatggcttattttcatagattagagaaaaaagggaagattagttttttaatgaaataagtattccattttacctgaccaccttccttaaatccttaccttacaggttaatcatatgagattctatactatttttaaaatatttaatgtcatttcgaaaatttttggaaaatcgagaccagcctggccaacttcgtgaaaccccatctctactaaaaatacaaaaattagctggtcatggtggcacatgcctgtaatcccagctgcttgggagactgaggcatgagaatgacttgaacctgggaggcggaggttgcagtgagcccagatggcaccactgcactccagcctgggtggcaaaaaaaaaaaaaaaaaaatgtttttggaaattgttaagagaaatacagaagaacatatattctaaaagttttttttgttgagacggagtctcactctgttgccaggttggagtgtagtggcacgatctsggctcactgccacctccgcctttcgggttcaaacaattctcctgcctcaccctcctgagtagctgggattacaggtgcgcgccaccaggcccagctaatttttatatttttagtagagacggggtttcaccatgttggccagggtggagttgatctcttgacctcgtgatctgctcaccttggcctcccaaagtgctgggattacaggtgtgagccaccgcacctggctctaaaagcttttctattgcatgttttttctttatcttttcttcattctttgattcacacatatttatttatagggtatattttcagttgaaaagtatactttttatagttctaaaaacgtgctagaattgtttcttttcgytttttactttttcctcatatgaaaacaatgttttatttgtcaatggatatacagatacttattattttaaccaggcttactatttatttttttgtagagatactggtgtaatggtaaaattatatccaaatatgactgcggtactgcttcataacacacaacttgatcaacgaaaggtaaaaagacagatgttattgttattatttttataactgccttgaaacactgtattgaaattacctaggttggtaagaattatacactttgcctactactagcctaaacagagaaaacaagtggcagagatgctgctggcaaaaagttttacattgtttagcataaagaaaaattggctgggcagggtggctcatgcctgtaatcccagcactctggaagtccgaggcgggtgaatcacaaggtcaagaaatggagaccatcctgaccaacatggtgaaacccagtgtgtactaaaaatacaaaaattagctgggcgtggtggcgtgcgcatgtagtcttagctactcgggaggctgaggaaggagaatcgcttgaacccgggaggcggaggatgcggtgagccaagattgtgccactgcactccagtctggcgacagagtgagactttgtctcaaaaaaaaaagagtgtctgttttaccatatattaaaatatattataaagccatagacaataaaatagtatattaccggcccagaaatagataatccatgcaacaagaaaacaaaaactagaaataatatacatgggattataatatacgctagaagttgtattatagtcagtgaataaagattatttaataaattatattggtacagctggttatcttaaaacaggatctctactcatttttatacctaaatcctgtctggatcaaagagctaaatgtgctttttaaaaaaggtggtaggaaaagataatcttgttggggcaggagggtttactagaagaaaattggatgttttaataagattagtagtggagaactcctcaacatgatatcaaagccaaaaaagtaaataaacttacaaaatttgaccccataattttttaattatatggcaaaaatttcaataaggttaagagataatcagcaacctaaagtaaaaatgcttatatgcagaagcttaatttacaaagggcttttataaatccgtaagaatgatgaatatcaatagaaaaataagtaaagaacatgaacaaattatttttataaaaagccaaccaagatatttaatatcaacagcaatttttgaaatgcaaatgaaattaagatatcagttttaactttcagatagtttaaaattctcagtstgtataagagaaaagatggacattttcatacactgttgatgggggtgtgaattgggacaaactttttagagggtgtttggtaaatgtctatggacctagacattgtaggattttatttggagaggataattagagtagatgaattcatgatytgtgctacactgcaacttattttttttcaccttattattttgaaaagtttttaatgtacaaagaagttgaaagaatgatacactaaaccctcatatatctttctcctatattcatcagtcattaacatttgcaacactggaatttaaagcaatttattgtctttaggtgattgtttaaataaactatatagtttgaaacttaacggtaattcttaatttattgatatgaaaagatgtccttgggccaggtgcagtggctcacgcctgtaagcccagcactttgggaggccaaggtggacggatcactttaggtcaggagtttgagaccagcatggccaacatggcaaacccccgtgtctactaaacatagaaaaaattagctgggcatgatggcgtgcacctgtaatcccagctactctggaggctgaggcaggagaatctcttgaacctgggaggaagaggttgcagtgagcggatatcatgctactgtactccagcccggatgacagagcgagactccatctcaaaaaaaaaaaaagatgtccttaagatatacagtaagcacagagggtccatttttataaatgccgtacacatacactaagtagacatctgaagggatactcattggaatgttagcagtagttatctacaacttgagagggttttgagacagggtcttgctctgtcacccaggctggagtatagtggcatgatcacagctcactgcagcctcagcctcccaggctcaagtgattctcccaccttagcctctggagaagctgggtccccaggcacaaaccgctacacccggctaatttttttggattttttgtagagatggggtttcttcacgttgcccagtctggtttaagcagtccttccacctcggcctcccaaagttctgggactacaggtgtgagccactgtacccagcctgttttggataatttttatgttcttaatacatctgtattttaaatctttataattaactgatttttttttttttttctgagacagagtctgactctgtcgcccaggctggaatgcagtggcataatctcagcttactgcaacctctgcctcccagattcaggcaattctcctgcctcagcctcccaagtagctgggactacaggcgtgtgccacgacacccagctagtttttgtatttttagtagagatagggtttcaccatgttggtcagactggtttcgaactccggagctcaagtgatctgcctgccccagcctcccaaagttctgggattacagccgtgagccaccatgcccagctgattttttttttttttttttgagacggattctctctctgtcacccaggctggagtgcaatggcgtggtctcggctcactgcaagctccacctcctgggttcacgccattctcctgcctcagcctcctgagtagctgggactacaggcgcccgccaccatgcccggctaattttttgcatttttagcagagatggggtttcactctcctgacctccagagatggtctcaatctcctgacctcttgatctgcccgcttctgcctcccaaagtgctggaattacaggcttgagccactgcgcccagccgctaactgatttttttaatcagaaaaactaataaagcttgaggaaaaaatgtgtacttccatggacactacataattatgcacaacaactaatagattaacatttttttttccagattaaacatcctactgccctaggattagaagttggccaagaaattcaggtatttgtattccaccttttagccttgaagttgtaaattgttcttgaagcttccattgtttttttcaaaaagttgaaagaagagtcaccatctatgaagttttttatttgtatgcagtacttcatttttaatcttagaattgcttgaacagactcattaaggatttaagacacaattctttccctcaaggagcttgcagcttggccaaaatggtagtcacccttagttcgtttaaaaaatacatgagcatgttagtgttagctatgcagactccatgatttgggcactgacgtaagaactgtgataaggtaacttgttaaagtctttgaatgtcatctttgaggaggtgagactttgtttctccactacttaaagtttttgagcttggtaagagccatgttattcaggcctagaattcatataacaaaattggccctttctttgtagtcctttatgagtggatgaaagaagtcattgccagtctgttttttcgggctccaccacattgtctttcacttacgctaatacgcatgacctgagtaactaaggcttctggtttattcccaatgtgtagtcttattgtccaagtagcctccaggggaagatgagtgctaagatatagtatctctgtataaggttgattttttggtttatttgttgttgttgttgttttcacatcagaaggaactttaaacctttgcatttgcccctgactttcattttccaaggtgaagccaaataaacactaatgtgttggtcctttgagcagtagtgaaaatccaagtgacctaagcataatcctctatagtatataacacaattaggctctcaaagcccttgtctaggatcattcactatgcctgtgactgttcccccagtataaggacttggcctggtgagaataaaaaggcacagatgagttcagcggcagattatagttgaacaactaactgccccgtctcttttctcttttataatgactacttatatgtgttaagtgtatacgtccacttagcactgaacaatgctttcagtgaacaagtaaaaacaatcattgccttatttggaccatgtaaatttaaatgtctattagtttagatgtcactcaatgtgctgtaactttaaaggaagatctgtttctttaacacaggtgaaatactttggacgtgacccagccgatggaagaatgaggctttctcgaaaagtgcttcagtcgccagctacaaccgtggtcagaactttgaatgacagaagtagtattgtaatgggagaacctatttcacagtcatcatctaattctcagtgatttttttttttaaagagaattctagaattctattttgtctagggtgatgtgctgtagagcaacattttagyagtatcttccattgtgtagatttctatataatataaatacattttaattatttgtactaaaatgctcatttacatgtgccatttttttaattcgagtaacccatatttgtttaattgtatttacattataaatcaagaaatatttattattaaaagtaagtcatttatacatcttagaaaaaattacwgttttgtttttacaattctgaaatatatgaaaaacttagaatatgtcatatgttattataacagatctcttcctacatcttatttttcttctttgtatacagtagtgacagtttaccttcagtcatcctacaggtcacctctgtgcccaacaactttacttgcctacaacggttcacaaactggaacaggccatattcaaagccagtgcctatttcttcagaactgttaacagatatagtgagttgagggagctaatctgatacacttttgataatataatgcctttcaaattagttaccaaatcataaacagagtggaataaatataaatkagattctaactaggatgaatgtggtagtaatgatgtatatttttcaaatttacctaaacagaaagattattggctaaggcaggcggatcatgagatcaggagatcgagaccatcctggctaacacggtgaaaccccgtctctactaaaagtgcaaaaattagccgggcgtggtggcgcatgcctgtaatcctagctactcaggaggctgaggcagaagaatcacttcaacccaggaggtggaggttgtagtgagccgagattgcgccattgcactccagctcaggcaacaagagcaaaactccgtctcaaaaaaaaaaaaaaattgtttacttrtcaaattgaactaggtcaatttgaatatgtgtattgctctaatgtatggaagttcttagtataagagctgaaggatcatgactttcggttaatagatgtttgaaatagatgtttagaggttactgatacacatgtcaagttgttcattcccatcatttaaaatatcaccttataattccacagaaaagtaaatggtatgtggacgtcataatttagaatgtgtaatcttttttaaaatcttataaaaatacactggactcagtggtacgtgcctgtagtcccagctacttggaaggctgaagtgggaaggtcactagagcccagaagttcgacactgtagtgtgcaacaatcatacctgtgaatagctactgtactccagcctgggcaacatagcaggactcttatctctaaaaaaaattttaaatcttataaaaatgtaggtatatctggccaggcatggtggctcacacctgtaatcccaacactttgggaggtcaaggcgggtagatcacctgaggtcaggagttcgagaccagcctggccaacatggtgaaaccccatctctactaaaaatacaaaaattagctgggtgtggtggcgggcgcctgtaatcccagctactcaggaggctgaggcaggagaatctcttgaacctgggaggcagaggtggcagtgagctgagatcgcaccactgcactccagcctgggcaaaaagagtaaaactccatctcaaaaaaaaaaatggtgggcacagaagctcatgcctgtaattccagcactttgggaggccgaggcgggtggattacatgaggtcaggaattcaagaccagcctggccaacacggtaaaaccccatctctactaaaaatacaaaaattagctgggcatggtggcaggcacctgtaatcctagctactcgggaggctgaggcaggagaatcacttgagcctgggaaatggaggttgcagtgagccgagattgcgccattgcactccagcctgggcgacagagcaagactccgtctccagaaaaaaaaaaaaaaaaggtaaattcatgactcagggttaactagttcataaaatattacaaatttatctggctaaaccaaagatttttaagtcaataaacattgattatatatctattgtgtgtaaaatagcatgttaggcaatgttgatatacttctgaaatattaaagattaattgaaaatgaaagattaaatttatttgctttctacacttgatatcgactattatttaataacagtaacaaaagtttttattctcacttctgctttctaagacataattcttattttaagatatcatccttaatggtagaatttcaaaattgcaatttgtgtttttcttaaattttctgttttctttttcaaaggaactcccaactcctaataatatggaaaatgaagccagttcttaaacaaactccagaaacctgaactgacacaaagtacaaatacagcttactaactgcaaaccaccaaaagaacaccatttctgcttaaaccaagagcctacactttatgtctgaacttttcttatttttgtcttcatttaaatgttggtagttttccctactttccaatgaagtttttctttttctttctttctttctttcttttcttttttttttttttttttttgagacagaatctcactctgttgccaggctggagtgcggcggcgcaatgttggctcactgcaacctccacttcccaggttcaagcaactctccttcctcagcctccctagtagctgggattacaggtgccctacacccggctaatttttgtatttttattttattttttcttatttttttgagatggcatcttgctctgtcgcccaggctggggtgcagtggtgcattctcagctcactgcaagctccgcctcccgggttcacaccattctcctgactcagcctccccagtagctgggactacaggcacctgccaatatgcccggctaattttttttttgtattttttagtagagacggggattcaccatgttagccaggatggtctcatctcctgaccttgtgatctgcccacctcggcctcccaaagtgctgggattacaagcatgagccgctgcgcctggccccaatgaagtttttctatgacggctatattatatgctggaaacactaatttatagtgactcagatcaaactgaatgccatctttggtggttagctcaatacaagtacttaaaagtaagactttttttcccatgacttttgttttgatacaggaacacacatactccataagttactgttctatcacagtacagtttttatataatcattttttcttctattacagaatatcttacattcttggatctaaaatgaaaacatgaatatctttcttagttcagttcagccaagcatagcattcttttattcatcatttaacatgtgccaggcattataaggtatgcaggggatgtgtcagtaaataaaagacctaagttaggccgggcacggtggctcacacttgtaatcccagcacttagggaggctgaggcgggtggatcacctgaggtcaggagtttgagaacagcctggccaacatggagaaaccccgtctctactagaaatacaaaaattagccaagcgtggtggcacatgcctgtagttctagctactcgggaggctgaggcaggagaatcacttgaacccgggaggcagaggttacagtgagccgagatcgtgccactgtactccagcctgggcaacagagcaagactccatctcaaaataacaaaaacagacaaaacagctaaagttccaatgctcatattctagagtttggaaattgatagcaaattacgatacagcaggtccttgaataacttttttttcaacatcatttgcattaaaatgttgttgagaaggaaacaaaacattgattcctggccaggcttaccgtctgtgtggagtctgcactttttcccacgtctgcaggagtatattagtccattcttgcattgctataaagaaatacctgaggttggatgcggtggctcatgcttgtaatcccaacactttgggaggctgaggcaggtggatcacctgaggtcaggagttcgagaccagcctggccaacatggtgaaaccccgtctctactgaaaaaaaaatacaaacgttagccggccatagtggtgcacgcctgtaatcccagctactcagttggctgaggcaggagaatcgcttgaacctgggaggcagaggttgcagtgagccgagatcatgccactgcactccagcctgggtgacacagggagactccatctcaaaaaagaaagaagaaatacctgagtctggataatttattttattttgtttgttgtttgttttgaggcagagttttgctcttgttgcccagtctgagtgagtgtggatgtgtgtgtgagtgcaccctgcaatgtgatggctgtcctgtctagtatcacttcccacctggcaccctgaactgccaggatgggctccaaccacccaaaaccctgaactgttgtaatttgataaatcatcttgttttattcatctttcttgaatgttgtctagctcacatttacttcagtgtttaacatcagaaatgttttggtctttatttgcaagtttggtaattttttttttttaccagaaatgtgccataggatcttaactcttgtttatatcaattagcctgtggtaaatttggtttcattttatgtagtttatcttagagttacagtttgcaagaacctatcgaagacattaagtaagaacttaactgtacaacatgtcaggtagtggtaggtaccttaaagaaaaacaactagataaagagatagagtgataaaagttactatttaatatgaaatgatccagaatgtcttctctgagtagataacatttcagcacagacttaaatgaagcagaggaaaaagatatgcagctatttgggaaagaattctagatagagggactaacaacttcattttcacttggcattgcgttgaattgtttacaagatacaacagccaacagcctttcaatttataacccagtttcacatagtcttactccttaatcttgtgcttgttcttcaccgaaattagaaagcaaagtagcaaagtttattaacgaatatgaaacaagggatggccaatacaatatgatattttttttttttttctttttttgagacggagtctcactgtgtcgcccaggctgtagcacagtggcgtgatctcagctcactgcaacctccacctccctgcaacctccacctcccgggtccaagctattctcctgcctcagcctcccgagtagctgggactacaggcgcccgccactacacccagctaagttttgtatttttagtagagacggggttacaccatattggccaggctggtctcgaactcatgacatcaagtgatccgcccacctcagcctcccaaagtgttgggcttacaggtgtgagccactgcgcctggcctaagatgatattttcaaagcatttaatcaggcaagaatatcttggttacttacaaggaatgggtagacactggaatcatgtgacaagtttatcaggcttttgcaaaattccagactcatgagagttgagactagagtggtagacagtggaaatgaaaagagagttgttttagttaaagattcttgctaaagcaaagagggaaaatgatcatgggaccgtgagtttattttatggaagccaagtcacaccctgtggaagactggaatgaggactaacaagccattaagaactagggcagttcatctctgcttaattatggagtctcatggcctctcttttgtgcttctttccacacaactgcttttttaaatgtttatttatttgttcgtttttattctctgcaaacctgttttctcagcatagggcaaaggatggctgtcccacaggacgttacctgtcctttataggtttgtgttcttttggaggaaatgacaagctcagcttgggaaaggtgttaaacctgactgagattgccagataaaataatgatgccaaattaaattggaattacagataaacagatgttcagtgtaggtcccatgtaacactaaaagattattccttgtttatctgaagttcaaataatttaactgaatgtcctatatttttatttgctaagtctggtacccataagccagatataagcaactggtcagacaattgtctatatttttatttgctaaatctggtaaccctaaacctggtataagcaactggtcagaaaattaccaagagctcacttctgagaagagagtgtattcagaaaaagtgggctgggcacataccaagatgttgcagagcaaatataagggataatggatggacttaacccagataaaatggggagtgagtggcaagtggagggaagagagcggcagttatgactaaggatttcaggctgaggattgtgaggacaataggatctgttacataaatagaaactaaaagggacaaaatagggttgtttttgtttttgagatggagtctcgctctgttgccaggctggagtgcagtggtgtgatctcggctcactgcaacctccgcctcccaggttcaagcgattctcctgcctcagcctcccgagtagctgggattacagctgcacgccaccatkcccagctaatttttgtatttttagtagagacggggtttcaccatgttggccaggatggtctcaatctgttgaccttgtgatctgcccgcctcagcctccaaagtgctgggattacaggcgtcagccaccatacctggccaatggacaaaatagttttaaagagtttaaatagttttaaatagtttaaagatggcctgggtgtggtggcttgtaatcccagcactttgagaggccaaggtgggtggatcacatgagcccaggagttcagtaccagcttgggccaa

SEQ ID NO: 93634 - DNA, 92958 bp, Homo sapiens
aggctttccctgtccagttaatataaaattagaccctttgccttctagttcctcacctttctttgttgttctcaataataatagtaataacaacatacataacatttactatgtaccaggtacaatagcactttatatatattaggtcatttaaatctcatatcactccataaagtaggcaacattattatccgttttctggatgatgacattgagacacagggaggttaaacaaattgcgccaaggtcacaaagctggagttgaaatgtgaatgcaggctgtctggctccagcatggccttttagctactgcactattttgcctctttatagccctggtcattaccatattttagatttattatctcccattcttcccacttgtttcagttactgctgcataaccaaccaccccaaaacttggtggcttaaagcaacaacttattatttctcaggaatttaggtcaggaattcaggaagtgtttgactaggctgttcttctgcttcacttggcattggctgatgccactcattcagctgcattcagatggtgactgggctgacctggaaggtcccagaaggctttactcatatgtctggtacctcagtgtttatccatgtgacctctctcttcatatggtcaatcaatctggggtataccatggaagctggctttttagagaaaaacatggaagctggctttttagagagaaacatggaagctgccagttctctttaaggccttgattcagaacttcattactgccacattctattacttaaaaaaraaagtctcaaggctagcctacatttgcggggagaggacacaggatccatctcttgatgtcaataatgatgtttgtatgcatggagggaggaagtgatgacttccgtgttgagactctcttccacaccaccagagtgtttgttccatgagatcagggactcgtgtctattttattcattattatgtcttttcagcgcctataacaatgcctgacacataataagtatgtaataaatatttattttgtccctgaatttaaggggcaggtgaaaggagtctgcaaaggtaaaggaaaggtctgaaggagtaggggggaaactcctgctatgactcttggaaggagtgtgtcccggcagtcaaggaagaaaaaagtgaaaggaagatacgattgagaactagacccttaaggaaaatgtttagggatgggtgcagtggctcacgcctgtaatcccaccattttgggaggccaaggcaggcggatcgcttgagatcaggagttcgagaccagcctgggccacctgggccacatgtgaaaccccatctctactaaaaatacaaaaattagccaggtgtgtgcacctgtaatcccagctacttgggagcttgaggtgggaggatcacttgaccctaggaagtcaaggctgcagtgagccaagattgtgccactgtacttcagccttggcgatggagcaagaccctgccaaaataaagtttaaaagctttaaaaataagtaaagagcatatgattaaaaatttaaacagcacaaaatggcatagagggaaaagtgaattttcttctccctcttgttcctgattcccctccacagtggtagccactctttatcctttcagagctaatacatgcatatactaggataaaaatatatgttatacctatctatttgttgataactaaaattaaaatcctgagtcccccacccaactgaatggaccctcttttggccaaggggacccctgagaaaccttaaaaactgagttcctggcaatggcagagtcagacatgcctcattataacccctcccttctgtggcttagacacgtgacgagccgttaaaatagagatcacaagactgatggaacagactctttgtggcaataagataccaaattacaaacaggatctaaggccacaccaggaaaaggttgtcacacacccctacacttaaagaataacctatgttctgggccaggtgcagtggctcgcacctgtttgggaggccaaggtgggagaactgtttgggcccaggggtttgagaccagtctgggcaacagagtgagaccctgtctctacagaaaaaaaaaaaaattaattaactgagtgtggtggcatgcacctatagtctcatctactcgggaggctgaggtgggaggatcgcctgagcccagaaggttgaggctacggtgagccatgttcacgccactgcactccagcctgggtgtcagagtaagatcctgtctcaaagatgaatgaatgaatgaatgagctatgttctaactgccaaaggtttctttctttctttttttttttcctagcagctaaacaagtgctggcattgagataagcaatattaaaacaattgcagctcatttaccaccagatgctgactaactgagcctctgtcccacaagccataactatagctttgattggacaagacactgatttcagtaactttctcctgataagagaccaccggccatggactggttctggctagttcacagtggctgagcacttaagtgcctttgtattcctgcttcaccttcaacattaaatgcattacataattataattgccctctatatcaaaatgatattataattatgtaatgcaattaatgttaagtctctatcccaaagtgaacatggggtgcatgtaacatgcatgctattcagtatacatgtgtcaggaccccccttagtgaatattcaatctgttcaatgtgtatgtttagccaacccattcagctcctgactcaatcgttcctccttcaaaatgcctgctaatggtctctactgtaggctatacttccaagcctgtcagtatggccaccttgcaggttataactctttataagaaaagaagtctcagcggggtgcagtggctcacacctgtaatctcagcattttgggaggccgagacgggtggatcacgaggtcaggagtttgagaccagcctggccagcatggtgaaaccccatctctactgaaaatacaaacattagttgggtgtggtggcgcgtgcctgtaatcccagctaatcgggaggttgaggcaggagaatcacttgaacttgggaggcggaggttgtagtgagctgagatcaagccactgcactccagcctgggtgacagagcaagactctgtctcagaaaaaaaaaaaaaacgaagtctcctttctaaatctgagacaatttgtatatctcaaatttagaaaggtgattcttcagtttacactatcttccaacctacctatctctctcctgaaaagacatacataacacacaattggtagactactatggacaggacttagcatctagcttttttctcttatctcctaatttccagatcattccatatcagtatatagagatcatcctctttgttttagatggttgcatagaatgcttccattctatgacagtaccattagattacaaaatgagaagatgactattgatttcagtagacttaaggaaatggtgaggaagactgggaagtcagaaagtagaggtaggaaatgaggttggaaaggaaaaaaggcagaaagtaaaaaaattaaagatgagatagatagcaggtttatacactgtaagtatataggaataagaagacaggcagaggttgaaaatacatgaaggagaagggataagtaatggaaatgtaaataaaaaatgaaattcttagcccccccaaccaactgaatagatctccctccaccctccttggccaaggggatcctaaagaaaaccttaaaaactagttaaggccatgatgcgaaggcaggttggacatacctcattatatcctctccctttggagtttagaccagcattaaagtggtctaaaccattttcatgaaatgaaaatagagatcataagactgacaaaatagactcttgtagcaataagattatccaactctaacctgactatggtatagcattacaagacagatagttggccctgaagaaaataaaaatattttaccccaaaatatatttctttgacatattttgaaatgaccctgcaaagctgtctcttgtggggggaatttgcattttatacagaatcactttcctttttcaggtcttttcttgatccaggagagatttaaccaagagtctgacacattttaaggtcctataacatatgctacctggaagcttcatctacgtaacaagaaccttggcttctataacccccttcattttaactcaaatatttctttctgctaacttcaactctttaggaaaagcttagctttttcaacccatcataaagtctctgaatccacctataatctgtgagcaccaccggccccccatgtattgatctatgtctttgcctataacttctgtctctctaaaatgtataaaaccaagctataacccaaccaccctgggcacatgttctcaggacttcttgaggctgtgtcccaggccatggttactcatgtttcgatcagagtatatttaacctcttcaaatattttataaagtttgtcttttttcatcaacagaacaaagtctttcctttggggagattagggatcctgagttcaggatcttctaagaagaaagagggagaagaaaaggactcggtgaaaaggagccggggctcggtggctcgcgcctgtaatcctagcaccttgggaggctgaggcacgtggatcaattgaggtcaggagttcgagaccaggctggccaacatggtgaaatcccatctctactacaaacacaaaaattagccgggcgtagtggcgggcacctgtaatcccagctatttgggaggctgaggcaggagaatcgcttgaacctgggaggcggaggttgcagtgagccgagatcgcgccactgcactccagcctgggcgacagatcgagactccctctaaacaaaacaaaacaaatcaaaactggttgcaggtaggttttgtggtagtggctgatgggatttgggatttaaggaaattcacctctagtggtctcactttcctcagagatgtaagagacaaaattttttatttttatttttaccaaagcgggtgagtgagtagagttcagtaagaggttagaagagcgtgagggctgggaacagcaggggaggggaataggagataatctgagtagcaatgtgtaaatgtgactgtcttaggctcagcaatattgcgtagtcgcacgtggaagtcccgactgaagttggacacttttcgttcgcagtggtgccaattctcagggttgtgtgattttctgcaccgatgcaggagtgagcaaggttggttgaactgttgcagactaacagttttgcaggtgggcgaaggatcagggaggaaattgagttgagggtgttggtgaataggatataggagtttcagaamccgactacacatctgtcgttgatggtctaaatatttgcatgtttgcaggtccagcgatggcacaatgcctagcagcagaaggtttgcacccactgtgcgacatgagtggcagctctggaaaatcataaaatcatgggaggacttgagagtgcaggctgggtggggtgggactgtggctgcgaaaaacagtgttatgaaactgtgcgcgggacaagaaagctgattttactgattgtatattggggagtactacgggaatcactggagaggccacttcattttctcctatcccaccccatcttttggggttgcaactaaccagtaagtttacacattgaggatacaatggcgaaacggggccgcgaggcgatgacgtcattcgcgggagtaggggggagaagcgaccactgttagggtactgtccataaaggcaatttgaaaatatttcagcctttttacttttatacttccggcccttgcagtttgaggtggtaacaaacgactgctgctcccaaccactttcaccaccgcctgttaccatgggagcgctcgggtagctaggcttggacgactctattctacgtcatcatcaaagcgcatctcaggactgatagctccgccctaaactaagggagagactgtgctcccaagtacgtagcctgcagtgcctaacgcattctcagcaattttgacccccaacagacgccgtcgacagtctcccaagaacaattcccaggagctcggattccaagagccgcccgcgccctcgtttaccttcgctagtcgccctgcagccccgccctgtccggaggccccgccctccatgaatcagctgatyccgcggacccactgggttgccaagctcgcgccggatgcggagcgcggtgctgccggtggagcttcaggtgagcgagtgtgggtcccgggttggctattggctaaggagggcttatcggctgggaccccttgtatgcggaaggccggggacagggagctaggcggaggctgtggtcgaggccggagagcgccctgcggggggcctgcggagacggcgcccgcattttcccagctctgggtgcgatcgactgctcctgccggtccagcagcgcccgaggcggcccctgccttggccccaggttctcccacttgcccckgtctctccctccccagactgggcgccgctgcagtggtctcagctgcgtgaaattccttcaagccccctcttcccgcctccacccacgctgccttccagctattcattcacgagaatttcttgaatgcccacactaggcgctgagctgataaactggggtccgtggcctggaaccctgctgagtgtccctggcggccttgccacagggtgcaaatcgcgttgaagagtggaccaagggctacttgaaaaggcggttgcggagaaagaaaatagctttgataataagaattagtagtttaggcaagtctttgagcctatcaagtaattcatcaagaggagaagataagttattttgagaagcgaagccagaaaaataacacaggtccttgacgctggtgttcgtcctcggataatagggctgctttggagacaggcaacagtagactggtagaatcgttctattgcttaaggctttgatggtggaagagaaaaaacactcttgttgaagtggcatatccaagaacagtgctttctttctggtttaggatggagaaggaactgactgctgtacccaagtgaagatctttactcagttacccttatatttggctatatggaataaaattgtgtgatatgtttattctgagcaggtacaaaacttcagcaaacctattggtcccacatttycccccccatttatcatatgatttggagtgaccggttgacctttgagttaatgaataatttaaagcagtgaaaaattttttgcagtaaactacggtgttttaaccttgataacataagcatagtggttaagattctaggctttgtatctgaacatacccagagtcacatccatttacatctttgattttgggcaagttatttaatctctctgcctcagttctcttgtctctaaattggggataaaaatgttttcctgataacagtacctttacatgtaatggttcatgtatcgtatttattacagtgcctgttttatggtaaatattcaatacatattagctgtttttataattaattcctcccactacatcatgatccaaactgactcttttcttaagtgatggggaagggaactgaatattttaaggaagtagctataaaatatgatttcaagttgttctgtagtaattttggtgttccataaggacattttaatgtgaaaaagatactgacagaatctatacatggtttgaatttattagtttctaaactatgaccagtattagcagatttaaaattcataattatagcaagaaaacgtcaaagttgtttaacagtgttaaaatttgaaactgtaatgatccagaaaaatgaaataccaaaccgataattttgggaaaaaaacaaaacttgagtggcattatgcaggccatttactttttaaatgtactcaatataaacaggaatcccttctctccaaatttcagtttttcagaatttgggctgtcatttgaaacacttactttgggcactttgactgttaaagaagcaaagggtatgctaagaacttcaatgagtcttgatgttagtgtttttgtaattaggtggaatctcctaccttttcatgaaaactgggtttaaagcagtagctgctgggtccattctaatgataatctcaaaaatgtgactgacttgtaaaaatctacaattatttattaatgtgagactaggtaaagtatgagttgaaaaactaggaagaaaggcagagtggtgatttttaagcttgtataaaggaaggcccgctttgggtactatgaggtacctttctcactcagaggcatgctgtgaggatttgtgacttttaaatcatttagctctttttataactttgtggaattaaatctaccacgtatttcaagtgtattcaggatatgaattttcctggtagagagttttaacagatttttttctcttaacccttcattgatgaccaaacaattttgttgtctgtaataagaaagtactcggttttgtagggtgtcagtccttaagaaaatgttaggtagtcatcaataaaatagcaacaatctctggcttgtttctttttcatattgcatttaattttcctttccctgtctcttattcatctgtatatgtgatggtgctttctttagcttatgtcttgatgtttgcctgcatgtagctgaactgattgatccaggtgggtagaggaaaaaatatttaaattggtagtttttggagctattgtatatttctttcaaatttgaagaaaatttacagttttctcaatacctatgagaaaaagactggggtttgttggcagagtttcgcttagctgctagtgaattatgtccagagagaagatcagctttcatctcattaattccacaaattgatcatctcatgtttcccttaattatcacattttaaatatttttcttttgagtcatcacacagttcttcagttcacatggcctccctatcaggaagggagtggtttagacccaataatggcatttgggtgggctaacattcactccaggatttttttttcttccacagcctaaatttttgtagagccaagatcttaactaaacttggggcaattggctaagcaaacatataacaaggatgattatagcagctctttaaaagagcaataaagtagagcaatccaactgtaaagattagtggggaaatggataaactggtttattcatgcaattcaatactatcttctcataaaaatgaatgagctagatctatacttaccaacatatatacatctcaagtatgtaatactgggtgaaaaaagcaaaatgctaaaggatttatacagtaagatgcatttgtgtacactttgaaagcaacataatagcatgcattatttattgatatgtgtatatctaatgaaagtacataaaagtaaatatgaaaacgtgggaatgggatacattaactttagaaatagtaactaattctgagtggagtttcttcacctctgtaacttattttttcttgtgttttaaaaaagagctgaagccaatatgaaaatatgttaatatgtgttaaaactggatgatgagtacatagatttgttatttatttttacagttttatgtatagttaagatagtttgtgaaactagcactttaacatttttatttataatcaggactgtttcccaatatgtttgctttattttactttgtaccctcaaattaggagactgtggaaaaagaactcttctttccctgcaataagaaaggaatgtgccagtgcagctccactatgtaaagcttttctaaggagaggagacagaccaattatttggtcagttttgctttgctgtttgtgctcctgggaaaatgctttctttaggacatgaagcctgcaggggaattaacattctagagatgcttgggaaatgtaggcatataccaatcatgaactctggaagtataggggagcaagttgtataataaggccctcaaaggaatttggacatgttgtgactcagatacaaaattactacagatttgtgtagtattagcattaacactttgaaaagcttaacttggttacattttattacaacgtagttatcttgagtttataccttgaatgcaagtatcccagttgttgctcaaagaaaatagttgtctctatagatattagtaagtaacctgatgacaatgtgttaaatggttgactaatgaataatacgtttagtagctgatccctaatgtaacctcagtatttaaacttgtgagttaaacaatatttttatttctaataaagagaacctgctactagcactattaaagcaagtgaaacttgtatcacgagaataatattttttagtatgtgtatttcctgtttagttatgtggcccctgaatgatcctaagcactgttatcagttggtgaaagaagtcatcatactttgaactgtaaatctaatattgcctttgaaaaaattgtggccattttaataagagagtagttgcaaatattaacggaataagtagtttgtgtcaggacttaccaggacattcactgtaccatgtaataacaggcacaaatagtggcagtacctgggaatttgaaattcatttgttagtattataatattcatcacaatgcatcatgggattattatttaataatcctgaaaaatgtgtttaaaatatgcagtgggtacaaaaaagagctaaatgggcattgctgggaacttattgtaccatgtttacacactttccccccactccaccatgaataatttccgattagaggatcgtcataaccaggagagtgtagtttcagtaagtttcagcatgaaattagcaaggcattaaaaaaagactgtaaagtcttcctgtttctcattgcaccaaaagctgtctgtgtactaaggagaaagggagaaaggaacacttctctgagttgtttaaccatttttaaagtgacatgagataaaagtgtcttcattgttaggatatacctttagcaaattatatatgagagtttctattaggagaagacacttttttcttttgtatctgttactgacttttattacaggcactagaaatctatagcgtggaagtctgtggattgcaactgaaaatcaggggctgtatctttcactcaagcactcacttaaatgtaaccagcttgttcagaatgattattatgggtacaagagtataccggtgaataagtcatagtctctgacctccaggagcttaaaatatattttgaatcagtgacttagtgcatatcctattagtaacaacattataactaataagtagckttctaggccagcctaccgaatatatccaatgccttaatttactgaattctcttactctgagtcaagatttgaaggctcattggctcccatactggtatcaggcaatgctttctgtgcagcagttaaggctgagaggcgtggggttccaagtggccttcttggtggttagttggccaaggcttcrgtgcaaggtgagttttcctcagccttccacagtggttgggaaggcttcagtggcaggatatccaggaagtagcagttgttgttggtgtatagattatttgtaagtcaggtgtttgagtcaaaggttaccataatccatgtgtaaacattgacctagcctctaaaagcaaattatttattaagcatttaccatgtgtaaaataccagactctgttattgtttactgcaaagtgtaaactctggtttactacattgtaataatatgtaaccaactcagactttaaaaaggaggtgttaatgactataggaaattgatggtaattttgtatccaaatcacttgtcactctactacattgtaataaaatgtaaccaactcagactttaaaaaggaagtgttaatggctacatgaaatctatggtaattttgtatccaagtcactcaatgtctatattccattcagggcattatgatacagtttactcacctattatttttattgcctttctatctgaatgtcttgtcattctaatcactgattaacattactcttataactacaattattactgttgttttactattttaaaccggtaattgagacaggagaataagactaggaaggcccagttttgctagtgtaaattagctttcttatcccttaagggtactgtctaactctatagagagccattattctaatgagaaagagaacatactagtatggaaatttcttaagggcaggaagtcatgtatttacagatgtttattgagtacctgttatatatcaggactaagctgctgggatgtactagaaaatacgatatttgtcactctgcttccatggaaattttagactagcataatacctggaacatagtagatgaaaaaaaatacatgtggttttagtggttgaaatttaagcatttgcaagttattatacttatgactcacaaatttacctttcaccgaattaagccaaaaagactttatccagaaaatagttgagtagagatgaatacataggatcctgcatgatttaactttctctttgcatttgggataatacactcaacacatttctctaccacatttaaaatttttatttatatcctgccttcttcccaaaaggatttaaagcagcttacaaaaatgtatagcagggygggataaaataaagaaacagactatacaacatgcatactgtgaagtcctcttcacttccaggtaccatcatatggaacccttatcctcccaccacaaaatgtataattctgcttatatctgtacctgtgatctctcttctttcaaaaacgtagacctttcttcttatgaaaaaaacaatccccccacatatattctggatggcatcctccttcactttgtctgggactttggctctgcccactgtcctcatcatccttgtatccaggaccacagcctttgtcatgcagacatattcagcttcctcccatctccccaacctccagcaaaagaaaacccttcattttcacattccccttcagctactgctccatttctttgtttgccatttcaacatttttcaaaaggatcacccactgaaaataaagatatttccacattgtcacctcctgtttatattcagcttacttcaatctggttttcagtgcccaaacaaaccactgagattgtggccatgctcagccgttacctgtgttggcaaatccaatggacactttagttatcttacaagaccccagctgccttgacctaattgacgtcctccctgaagtgctttcctttgctttcatgtgcccacggcagaccacttctcagtctcagtcctctttgtccgatcctcatcctatccaacttccaggcgcaggagctccttaaagcttgacactgcgctttcctttctctttccatatacccaatgacattatctattgtcttgtttttaaacactatccatacgccctcccaagtttagcagctgctgagacttttctcttgaactccatgttcatatattcagctattcacttaatatgtactcttgggtttctcacagacatcttgaacttaaaaataaattttatcctaccagaatcttatctttgcttcagaatcgtatctccctcactcttgcccatttcaggaaatggagccaccaacacacagctatttgaggcagaaccagggatcatttctgatacctgcttctccttggtcccccacctttgtctaatcaccaagtactagttgttctgcccccagagcatctctcatttattcacctcttcttcaccaaattggcagcattgtatgaaacttaagaacccaggcttccttcctccattgagaagatgagccgatggagtatttgcaggcaggatattccttgcaaaaattcattttggtgctccgtgagtgttcaccataaaattggtttaaaacttttgaaacaaatgtaaatcgtcattgaaataaatcattggcccttcgcattggctcacgcctgtaatcccagcactttgggagtccaaggtgggcaggtcacaaggtcaggatttcaagaccagtctgggcaacatagtgaaaccctgtctctactaaaaatacaaaaattagccaggtgtggtggtgtgcacctgtaatcccagctactcgggaggctgaggcaggagaatcatgtgaacccaggaggtggaggttgcagtgagctgagatcatgccattgcactctagcccaggygacagtgcaagactccatctcaaaaatgaaaaaaaaaaaaaaaaaaaaaatcatgaaagcatccatagactgtcccactggaagcaatgcaactccccagtgtactctccaaaatgaagtaaatgttcaaagtacataaaagaaaccaagttaagtataaaatagttaaaagttttgagacttctactaaaaaamgatagttgtttttgaatatagattcctggtcctttattcaaaacccttggggcaaggtgcattttggaattcagatttatgttttgttctttagagtaagatgcataaactatatattatataacacttcctgtgggatctgtggtgctgccctattcatactgatatttctacaacacgatgtatgaatattcacactaaagggataaaagtgataaataacctcatatcagttcaggtcagattttgctgtcagatgagttcaggtcagattagattttgccaccaaaagtgttattgaaaaaacttttaattttcagagctatagatttctggttaaggtattgtagacctgtaagatggttgtagctcatctttctaacagttgggacatctagactagaktgttgttgttgttgttgttgttaagggcacttccagatcatggtattaaaatgatatccttggctcgtacaggacaacttatttctctgttagatgtaacagaaggatgtgtrtccagtggagtctaaaagtggcatcagtttattaagaagcaaggtttgctctttgtttaaagggccccctggggttttgttactttacatatcactgtgaaggagataataatttgaaggatagagtggtatgctttaaagtgaatctagctgtgtcctgcggttcagaagactgaagtctggtttgctcattttacggagatgccatttatctgtggagaggccatgcaaggtaagagagggtcccacagtaaatgctgtttatgcaacatcacatggcttctttatcagagctggttaacaggtctatgcaggaaagttactgtaacagaagaaaagcagcagagtacaaggatcttgccctcttaaggaatgataaagaccttaaagcttctctggaagaaatatccccagaggaagttttatgattaggcaattttataaaaacttaaaatgttaaagcaatgaaataacatacagaaatttgaatgctatttgactggttgaggtgagtcttaatagatttcctggagagacaatcataaaaatattagaaagacaaaagtttttcatttactttcttttcctggatggatacgtaattgagaaagaatgttagattaaatagagttggtaaataccacccttacttaagtatatgaggataaaactttaataacataagatccccacatttagttgcaatattcctttttagttatgtttcctcagcartcagttttcttcattgccctattkgagtttcaggcagacgtatcttgttggaagatgtcaaacatattaaacaccattaaaacaaaatgagataggggccgggcrcggwggctcaaggtggctcatacctgtaatcccagcactttgggaggccgaggcaggtggatcacctgaggtcaggagttcgagaccagcctggccaacatggtgaaaccccgtctctactaaaaatacaaaaattagctaggcgtaatggcgggtgcctgtaatcccagctactcgggaggctgaggcaggagaattgcttgaacctgggaggcggaggttgcaatgaaccgagagcgtgccattgcactccagcctgggtgacaagagcaaaactccgtctcaaaaaaaaaaaaaaaaaaatctgtaaatactgatataaaaagatgtctgtgaaataatatattagttttctactgcagctgcaacaaattgttatgaacttagtggcttaaaataacacaaataaatatattatcktcaagttctgtgggctgaaagtctgtcacaggtcttgtagactagagtcaaggtgtcggcatggctgcttttttctggacgctctaggaaagaattcttttccttgccttttcagctgctacctgtcacctgcattccttggctcatggctgccttcttccatgttcagtcagcagtgtagcgtcatctctgaccctgcctccatcatcatgtctctttgattctcctcctgcctccctcttccacttttaaggatgtttatgattacattgggtgcacctggataaccaggataatctttctatcttaaggagagttggttagtatcacacaacctaacatagtcacaagttctgggcattaggaccttgatgcctttggagaccgttatttggcctgccctatagtaagtaagaaaagaaagttgtaaaaacagtttgtagagttttaattccatttaggttaaaaaaaaaatgagtggtggtgataaataatattgagtaaggtgtaaccaactttaagaaaactgtgctcaaaaatctggcactaagagagaataaaggttgactttattcattttatcaaaagattctcaacatttttgattgttagtaggacaaaattccgtttacatatagtgtgtcagttgtgtgaagtaaggtgtgcttgtgtgcttccacatcctcgtagaataattctctggcttccgctacctattgttgaaatttaatcaagggcgtagtaactccatgatctctgatagataagcacagattagatctggtggcagaatttctctgtacaccatgaactgtgcattttacaaaaggctaattactatcatggacaaagcatagtagcacttaattgtatttattaaatgaatatcatttattaaatttattcagatatatctcttgttaacatagtacccattttccaactttgaatgattcataatctttctaaaataagcattaggtggaaagtaattttcttcagatgtacagatgggaaatggtaagaattcacaggcaacctggaggaaacagatggaccccagatcactcctgccagtatgagctgtttccagaacacagtgaccattccatatccttttgcagaaaaaccacaaatttggccccaatatttttatggtttacacaaataagacctaactgcttttgttttcttgtgttttggtacccttacaaatgtggatttctgagttgaaatgcactcagcatttctgtttatttttctatctcttattttattaaatactgagtttctaaactgatgggccatgatatttgtaactataattttcatacagctattttctattaaaggtggattttaaaacagctgatttaaaattcagacttctttctttcaaccgtttgggttatgaggcatgttggtctgaatcgaaggtgatttggggaaaatgttccttcttccaataagtggaaaacttcctattttaatgacataatttttgtgcattactgaaaagtataaattaaaactacttgaatcagatacattactgaagagattttagaaaatctgagttaattggtatttaagtcttcatgcattccagacagagcgtttaaaaagtacccttaatgtgtgtgtactttttgtacttaacacattgatttttcagattgaacttttttctttataataaaaaacaaaatctattgcctggaagagtacagcttaattgtgggtagtcttttcttcctttgacattacatttgacagtcaatgggcatttttataagcttagtgggcaggctcagcctatgtttgactttggcaggcaagatatgaaatagtttaaatagttttactgcatatttatttcctagtgaatgtgcacttgttagagggctgctttttttttttttaatgtctgaggggtaaaatattcttttactgctcttttccttacttgtactgtttaggtcttgatagactttctgtaaagaaggaatgatttggtgatggagtgttcccactgaccgatggactcaaagaagagaaggtaaaaycatttcttccttttctcttatcctcctaggaaaacatagcaaacagcttcacatatgtgtagcttctcttcagtttaattttcttgttgatggttgttaagtgggaatagtgacatttgtagttagttcgttggtaaagataaaattttaaaaaggcttgttagttgtaagctttgtaagaagcactaaatgtcttcatttcatcattttaaagtgcttgtagccatttttccctcacaaataatttcaggttttcagaagtagccttgctaatcttaatcatcttccatccttaaagaactagttatggaagatatttaaaaggaaggttaaatgtatactgttcctcctatagaaccatggttatgtccagttataatttaagggaatattatttagcaaatatagataaatgcttagctattcaaaagagtttctgtgcctcattaaaattttggcatcagcgttctagaaaaaagaaaatgaaaaaatgtattaccaatggtggcacatatcttaatgtgcccttttcttagaagaaggcagttaggatatggtcattactgtgcagctatgtgttttgtattctttaaaccgaaatcatcagatgtgtagaattctttagctagaacttgagcaaagcrttaaggattttactgatatctattataaacttgattcctaaaaatttaaatagcagttctacacttaaactcaacataaagtgaaatatgaattcctgtttctcatattgttctcatcaagtactttttacttactataaaattttatgataagacttcaacttgggcatgttgtagctttgatatctcaacaaggagtgaatatattgagaagttagaatcttggaattttatgctaccaaatgctaaaacttctaaaaatagcccaagttttgtttgcttcttagatggagaaaagtaatttgtgggtttagagtgtccttcagtcttttttttttttttttttttagacagagtcttgctctgtcgcccaggctggagtgcagtggcaagatcttggctcactgcaacctccgcctcccgggttcaagcgcttctcctgcctcagcctcctgagtagctgggactacaggttcacgccaccatgcccggctgatttttttttttttgtatttttagtagaaacagggtttcaccatattagccaggctggtctcgagctcctaccttgtgatctgcctgcctcggcctcccaaagggctgggattacaggtgtgagccaccacgccccacatccttcagtcttttatataaatagttgttttaccttggcttctgtgagcataaccaaagcataaaataggtgctaattcagctatctgacctagtcatccatgtgctggtaaaaggtacaatcatgaaaagtattaagaacaaaggatactgttctgaattgtagaaacaattaagctatgtttcttgatgttttagctcaacagaggcagaaggatccaaggaaagaggcctggtccatatctggcaggcaggatcctttcccataacaccagagagattgccaggctggggaggaaagactgttttgcaggcagccctcggagtgaaacatggagttcttctgactgaaggtaatgaaaagaatggcgtaacaaatacgaactgcaatgctaacaaatgcctgagtgtggaaggtcaggtatgggagtcattggatactaggggttctttttctttttctttcttttttttttaaattttattattattatgctttaagttttagggtacatgtgcacaacgtgtaggtttgttacttatgtatacatgtgccatgttggtatgctgcacccattaactcatcatttagcattaggtatatctcctaatgctatccctccccgctccctccaccccacaacaggccccagtgtgtgatgttccccttactgtgtccatgtgttctcrtttttcaattcccacctatgagtgagaacatgcggtgtttgtttttttctccttgcgatagtttgctgagaacgatggtttccagtttcatccatgtccctacaaaggacatgaactcatcattttttatggctgcatagtattccatggtgtatatgtgccacattttttttttttttttttttttttttttgagacggagtctcgctctgtcgcccaggctggagtgcagtggcgggatctcggctcactgcaagctccgcctcccgggttcacgccattctcctgcctcagcctcccaagtagctgggactacaggcgcccgccactacgcccggctaattttttgtatttttagtagagacggggtttcaccgttttagccgggatggtctcgatctcctgacctcgtgatccgcccgcctcagcctcccaaagtgctgggattacaggcgtgagccaccgcacccggcctatgtgccacattttcttaatccagtctatccttgttggacatgtaggttggttccaagtctttgcttttttttattttattttttttgaaactgagttttgctcttgtcgcccaggctggaatgcaatggtgcaatctcagctcaccacaacctctgcctcccaggttcaagcaattttcctgcctcagcctcccgagtagctgggattacaggtgctcaccaccatgcccagctaatttttttggtatttttagtagagatggggtttcaccatgttggccaggctggtcttgaactcctgacctcaggtgatccacccgcctcgacctcccaaagttctgggattacagggatgagccaccacgcccagcctaggggttcttaatgaactatttctgttttcaagatatattcttactcccttatcaggaatcagattagttcttaaatttaaaatatactattaactagaataaaagggagagttatagttttaaaattttatggtaataaatacatgaaaaattaactttttaaaaggttacctattcagagactcttgctataacttttgttcattaagtctatcagaatactaatgctaataatagctaatgtttgttaagcagttgtatgccagacactatactaagccccatgtgttagtagataacaagttagtgagataacaagttccatgtgttatctcactgaatctgcactgctaccttatgaggtagcttctattattattcacagacaaggaaactgaaagtcagggagattaaattttcccaagcacacacagctattgaagtgtcagagtcaggactggaactcagtctgatttcaaagcctgcttttaaagccacttggctgaactttctcaatataattttttttttcaggcatgaatagcaattcacaatgcatattataaaatctatgagtctattaccgaaacgtgtgctgtaatttatagaggtacctttaatcttaatggcactttatcaactcaatcatgacaaatttgayttgggcaccaattgccatctacttcactaatttataaatttctgctctdtaagtatttattaaggtattaaataatgctttggtattttctttctaggaactaaaggaagacaaattctaggaaacaaggattaaatctggtcctggtggttgtatgggataaacatggatttctttctagtttgtcttatatcagttttattataatattattcttcaggactttaaaaacaatcttactttaaaagtgtgaactatattcaatacctgtcctatgagatttaaaatatatagttctcaagcaaatataagtggaattctgttgttgttttcaataagatatttggaatattttcattaagctaatgaaactggctgggcacaattgcctatgcctgtaatcccagcactttgggaggccaaggcagaaggatcccttgagcctaggggttcaagatcagcctgggcaacataaggagaccatgtttcctgggcaacatagggagaccatgtttctacaagaaatattttaaaaattagccaggcatggaggcctgcgcctgtagtcccagctacttcagaggctgaggcaggaggatagcttgagtctgggagaccaaagctgcgtgcagtgagctgtgattatgccactgcactctagcctagctgacaaagtaagatcctgtctcaaaaaaaaaaaaaagttattcgactataaacatggtatctttagaatcataccttcaaggctaggacaactgaaggaaaacttttcaaaaatatttaaatagcctatcgttattcatgtttaagcagtgtcctggtattaagtgtcacagttaccaaaagaaaacgtcgtctaacacaagtgtatgtttgaaattgcatacggacctccagtgctatcttttccagctgaggaaatggttgagtgctagaaattttcaaggttcttcatctctattaaatatgaccattagctcataattcaatgaagatacctcattgattcacttttatttatttatttatttatttatttatttatttatttatttatttattttgagacggagtctcgctctgttgccctggctggagtgtggtggcacgatctcagctcactgcaacctccacctcctgggtttaagcaattcttctgcctcagcctcccgagtagctgggactrcaggccagtgccagcactcctggctcttttttttttgtatttttagtagagacagggtttcaccatattggccaggctggtctcaaactcctgacctagtgattcgcctgcctctgcctcccaaagtgctgggattacaggcgtgagccactgcacccagcctgtttcactattttttatatgctccagtttttgtttttgttttttaaggagagggatctaaatatccatttctttgcagtattgctctttctagtggaataatgttaattgaaagacttggtgagctttttcaagtatactgttgtattaggaaacaaagtttaaaagagcttaaccagtgagcttattttctcatgtcagtattcttgaaccagactatacatttcctaataaatgcacatatcttccctstagccactattgagtccttacttatatagatgatgtgatgagttaacttgagtgtatacatgtatctgccatgtataataggtcaaagataaagtttgcatgttttcatcatcaactcaattgctgccttatgagaaaaaaaacagtgcttatttcttcattaattaaaaaaamtcataaatctctggtcatatggaaaagaaaggatagtgggcttggctcagtattttttaaaacccgtagccaagtctttgtttcattgaatttttagccagcatagcttatgtgtacctgctcccaagctcccacaatactacagtaaaattaagacttggtagcatagctggacatacataagttatttatatacccaactcactggtgcctttcattaattctaaagctagccagttattctgacaggttcatttgcttttttgctttgttctgttgtgatgatttgctttttatttttaacattttttaggcttacttcactttatttttcttgtataaaaaccctatgttgtagccacagctggagcctgggtcctctgtctggagactctggtgtgggtcttgacgaggtggccagtgaattcctgatacggagacttggtgaatacagtctccttccagaggttgggggccagttagctgtaggtcttggagatggcatcataggtggccttggtgaagttggccagggtggcagtgcagcccctggctgaggagtagcagtcatcgatactggccatcatcagcagcttcttgggcactagggctaagagaatgccagtgcctctgggtgcagggatgaggcgcaccagcacaaagccacagcagtctgtcaccttgcaagggactgcgtggtgcttgctgatcttgttcccccagtagcctctgtgcacggggacattggagagcttggccaggatgatagtcccttggatggcagtggccacctccttggagcaagtggccattgtagtccccagtggcaacaaacacctggaatctggtgtgctggccagtgcgcgtctgcttctgcactggcacaatcttcaaaacctcatccttgagagaggtccccaggaaaaagtcaatgatctcagactccttgatgggcagggagaagtgataggttttcagcaggacttcatcttcgtgtctttgaccaggcagctcagcttggtcatgggtgtccactccttatcctcagccttgcctccttgagctctgtggccccgaccctggccccagatgccactgcccaagcctccatggaagtcactgtggttccccatcccagggtctctggggcctctgggccctcctgctgccctagcttcatctgccatttgatgttttttcagagaagaagctgatttgctttttaaacaaatctcacctcagaaagactagctagtatctagtacataaagtccagggtgagcatcccacattaaaaaatctgaaatctaaaatgatccaaaatccagaactttctgagtgctgatgtgatggtgctcaaaggaaatgctcattggaacattcagatttgggatgctcagtcagtaagcataaggcaaatattccaaaacctggacctgaaatccaaaacacctctggtcccaagcattttggataagtgatactcaacctgtatatttatgtaacatctcaaaactatatataatgtgacatacaaagtgaagacagccatgtcttgttaagaactggtgcttcctgtacagcctagaggcataaagttaatttcttagttttggccaaaatgaatcgctaatatttttaagccattgcataattttttgctgttccaacttgtttagtagtagtgaattgtagatattagtgaatgtgtctgttttgtcttattttttgcttattttatcttaacatggttatttattttgcctttgaacacttggaatctgtttctataatagcctggatgatggccgttaggagtggattgatgtgaggagtttgtaggatgaggctgaaggaaaggattagcctcctgcactttgtagaaattctcactatagtgcagaatattaaaaagagtcatttttaaaaagatgaattaatgtgaaatactgtgtgcttgaaccagatttctacaactgcttttgaaaatttaaaaagaaaatccaatttggttaaatctakaggggactaaaagtttgctgttaaaatttttagttaattcactaacccttttttttttcttttttcttttttttaaccttcagatggtgaggtctacagctttgggactcttccctggagaagtggaccagtggagatttgtccaagtagccccattctagaaaatgccctggttgggcaatatgttattactgtggcaacaggaagcttccatagtggagcagtgacagacaatggtrtcgcgtacatgtggggagagaattctgctggccagtgtgcagtagccaaccagcagtatgtgccggaaccaaatcctgtcagcattgctgattctgaggccagccctttgttagcagtcaggattttacagttggcgtgtggcraggagcacactctggcattgtcaataagcagagagatttgggcatggggtacyggttgtcagttgggtctcattaccactgccttcccagtgacaaagccgcaaaaggtagaacatcttgctgggcgagtggtgcttcaagttgcctgtggtgctttccacagcttagcccttgtacaatgcctcccttcccaggatctgaagccagtcccagaacgatgcaaccagtgcagccagctcttgattactatgactgacaaagaagaccatgtgattatatcagacagtcattgttgcccattaggtgtgacactgacagaatctcaggcagaaaaccatgccagcactgctctcagcccctccactgaaacccttgacaggcaggaagaagtatttgagaacactcttgtagcaaatgatcagtctgttgctactgaactgaatgcagtaagtgctcagatcacaagcagcgatgccatgtcctctcaacaaaatgtcatgggaacaactgaaatttcctctgccagaaacataccatcataccctgacacccaagcagtcaatgaatacctacggaaactgtcagatcattcagtaagagaggactcagagcatggtgaaaagccartgccatctcaggtacctgctcaattttataaaataaaagtgtgtctagagttgaactgtatgggcttttctttagaaactttaaaatgagtaaggcttggtagcattttttattttttgagtttgattataattttgttttatcaggcaagcctagataaaggaaagaacctggattaattcaaaatcactctttatgtttgttctggccctttatgatattgaaaggtgtcatgttgggcttgttttataagtaggagcatttcatttttttttcttgctagtactttttttctatggctaaagtactgaattttggtgggccctgaatagtttaatataactagagattcacaaagattcttcttacttgtgtttgtaacactcttcagaattctgtagagaaaagtcttttccttctttaacagggaagattgttttgtggcagatccttcaattgtaggcagatttaaaacttacaggcaattacatgtttcagtttttttcaattatagctgtggtccttactgggcttaatttgaagaggtggctaatattttatctttttgtttgtttgtttttgagatggggtcttgctctgtcacccaggctggagtgcagtaatgcgattgtggctcactgcagcctcgatctcccaggttcaagcgatcctcccatttcagccttccaagtagctgggactatacacatgccaccacacctgctgattttatttttaagtagagtagagcctgttgcccaggctcatctcaaactcctgagctcaagcaatcctcccacctcagcctcccaaagtgttgagattacaggcatgagccatcatgcccagcctattttatatatcttattaaaactattttcattttgaagatttgtggtagaatgaacaaaagttgtttatcagtagcacatggtaaagtttgagttcccgcttaaactaaattgttttaaaaggattatttctgtgttttactcttagtgtggccttttgattttgctttaccaaaactgtaagaaaacaaaacaaaagatcatactcataaaagatctgtcctgcagtgtttctttttaggtttttgaaaccacatagcctcttgattctcaattcttattgtttactctgtcagaatgtgaacatgaaggtatttttagaaatagtctttatttcacaatctattcactgaaacttgtgggtatttgaatttttaaaaaaatcaaggataagctgtttggagaaaggtattataaagtctgaacaaagcaaaagtagtagtttaacaagaatgcatgtagaaaattcttagactgtacatgcttatcacattttacttactttgttaaacattggaagtttttgttacttatgctagtaacaatgtgtgtgtttctattgaattaaatttaatttatttaaattaaatgtgtgtttctattacatttaatttattctttgtaaataacatctcaatcatacagctaattcacaaggaatttatttgttttagggcaagttttttctcttctggcgagatataactgagactctctcacttgggaaataaaccaaagtattactggttgactggaactcctaaaattatatatttcatcaaaattgctaattatgttttttgtaggggagggcttattactatatttttaaatataattaagtagaaggagccagttagaacagtagttcaaggtttatataaggtagagttttgtgactttgctgtacctagtggttaagaaccccctaaaatagttacctctaaataccatcactgcttatgtaaggagcctttgtaaacaaaaagtggacatagtgacactagttcttctgaacaagctatcgtgggagctgtatcaccaaagaagtaataggctttgtatttctttttcgttttattaagtatatttgtttattgactatttacagactaatttgcatggaaatagctcttttgaatttagcgtttaattcaacaaaatgttttgagtacttacatgtcaggcacttcgctaggtaccaggaattatttcctttaggaagtcagatgccaatgttaaaatatacaaacaaacacacacacacacacacacacacatgcgcacacacacacattatatttgtattttagtttaggacaaatgaaggaatgtgtatattccctttgagatctttgggtacaataagaagcaaatttttcaatatgatctatgctgatgagctgaaagcttttttatgtgtttggtaggtacatttaatgaccttcctttttagggaacaatgatgtttgacagcttagagtaaatttcaactgattttttcattaagatatcagaaaactttagtttgactttctagtacacttctagaatcacactaagaacactggttccaaatgtttaattattaacctaccacatttgccatctgtggtagcaagagcaaaggtaatcctacagcttttctagcccctgggtcatagaaaataactcattgatgagccagtaaaggcactcragttgagcataatttgggagatgataggttacaggtataacttatttttccatctccatatgctatatctaaatttcaatttataaagcatttcagggaaagctttttttttcttcataaaatctaatttttttcctgccacttctaggtagtagtctgtataaattttcctgaaagggatcaataatgaaatttgcattttttcaatcttctgtccagggctgtcacagtgcacttggcattaaaggcagtgttttccatgccttttcttctccctccctttttactgtgtttaattttataaaagcagccgaggcttattttgaaataccatagaaaaacacaacatctagacaaaaggaagtactttggagaaggaactgtattttgagtactcatttccatttaatgtgttaactccatgatcaagaagagaatacctttagttgaagatgaagagaacttctgtcgttttagattcttacatgcaaatagcgatggatattagcctttctttttattgattgcttgttgcataagggattatatttttatrtaattttttatgtgtgtatattttagcctcttttagaagaagcaattcctaatctccacagcccgcctaccacaagcacctcagccctaaacagcctggtggtctcttgtgcatctgctgttggtgtgagagtggctgctacttatgaagctggtgccttgtcactgaagaaagttatgaacttttatagtacaaccccttgtgaaactggagctcaggcaggcagtagtgccattggccccgaaggtttgaaagatagcagggaagaacaggttaaacaggaatcaatgcaaggaaagaaaagttcaagtcttgtggatatcagagaagaagaaacagagggaggcagtcgaagactctccctccctggattgttgtcacaaggtaaggaaataactaggttttgtgaattgacttttggggaatccaggatgctcctgacatcgcatgctgtattattaaaaaagctgtcctaattatgaagctgacatattcaaatgtgaatatttatttaatggtggttttaaaagaaagttacatgtttatctgctttagatatcactataaagttagaacgtcactttttcttgatgtttgctcctgcttatgaaccttattgtgaatcttattttattgttctggagtgttacagtacccttcttatttcctaattgggaccgatactccagatcgatgaggttggagatgcgaccattggataagtgaattactgtacttgacttgaaagaggagagaattcttaagcttcaagaagagaaaatttcattttctgagaccataggcaataaactttttagaatattatgcagttggttcttctccttttctcaatcagttcagcagtctcagccatctggacttaatgcttctcaagagtggcctgcagaccagcagcatcagcagcatctgggaacttgttacaaacgcagactctcaggttccactctcgacttactgaatcaaaacatgcattagagcaaggtcccccaggtgattagtatgcacactaaagtctgagaagcatttgatgagaccaggatttggcagactttttctgtaaagagccaaagagaaatattttaaggtttgtaggacatcctgtctctgtgacaactactcagctacgctgtggttatgtaaaagcagccagagacaatatgtaatgaatgagtgaagctatatcccaacaaaactttatttacaaaaacatatggtaggccctgtttggcccatgggctataattgaccaactcctggtttacatgattttgtgcaaagctcaaaagttaggaattctagactgtactaaaacttaccttttttactctgcacctgtttctccccttgttctacttactgaacactcttgtgccactcttaattctcattaccaccagattttcctctacacaaataaaacttaagtcatgattaatgtgaatatatatgtatatatatataatatatatgatgtataagaaggcctatgatctctattaaatctgaaggagaatcttgcaccaaacttttcttattcttaagtgtcctttagcattttaagtatataaatatatttgcaatctctttgaactacaaatgtggaatattttttcatatcattacatcatgaatcccactaatagacttatatcctatggttaaattttacttagtaacctaaagtatctttcgaaaaattttacatgtactcttttccccctctctaagaattatctggagtacatccttgaggaatcttcaagtaggtttatttgagtctccgtatgcatagaaacgatacattcaccagaaaagatgttgatattaggcagtgatgatcactttcttgtggccctcaagttaatgacctaatgactaagtctctactgagtgacatttgatgattttcttcaaatcttatcctggcatcaaacactattcacatagtgttgtgtgtgtttgatgtaattttgaacactataaaagatggcaatgttcttttaaaacattttttaacatctctgtaaaataatttgaaataggcaagtacaaaagctttttagtatatccctttcataatctttttcccgtctcagaaatgtttacattttatagctaaaatgaattctttattacaattattcataatatatttcaacttagaccttgacttagaaaggctttttgtgttttaagagatgggagccgggcacagtggctcacacctgtaatcccagcactttgggaggccaaggcaggaggattacttgagatcaggagtttgagaacagcctggccagtatggcaaaaccctgtctctactaagaatacaaaaattagctgggtgtggtggtgcatgcctgtaatcctagctactcaggaggctgaggcaggagaatcacttgaacccaggaagcagaggttcctgcgagccgagatcatgccattacactccagcctggatgacaagagcgaaactccgtctcaagaaaaaaaaaagagacagtgtcttgctatgttgcccaggctggagtgcagtgggtattcacagatgtagtcataacacactataacctcaaactcctgtgctcaaggaatccttccatctcagcctcctgagtagctaggactacagccactttgcctggctcgttaatttttgttttcaaatgagaaaagtatttgtcagccttagtatagtattttgttcagcatattctttagaatacaagttctataggatgtcactagatgttgtacagaaaaggtttctgtggctaaatgtttggaattccagctgggttaaacatatttaaacagggcttttatttacaggatttgtcaccaccttcagtgtgtgctaatgtgtgtgtgaatctctgcagaggaggtagtgggaggatagattgtagcagtgagtatttaccaatttcatttgactaacaggtccccttttctacagagagcctctagaatatgcttcaaaaataccattggtggcgtatgtttttgaaaatcttaagtttgtccaaatgatatgttttcttaccctctggactcccactccttcaccccaygtctggttggttttcagtttcccccaggctcttaagaaaggctgcacgggtgaaaacgaggacagtggttctgacccccacatacagtggagaagcagatgcgctcctgccttctctgagaacagaagtgtggacctgggggaaagggaaggaagggcagctggggcacggcgatgttctgcctaggtaagcgctaccaacatttaccgatagaagttggcttaaacaaataatctctctcctgggaaggtctctaaatctcactttcctcatagaggaaatctgggctcttctagcttcagattattacacaccattaactctgataaaaagctgtcactttactcttgaatttgttcttaacagtaaaggacttggccaggcctggtggctcacacctttaatcctagtgctttggaagactgaggcaggtggatcacctgaggtcaggagtttgagaccaggctggccaacatggcaaaacccagtctctactaaaaatacaaaaattagctgggcatggtggtgggctcctataattccagctactcaggaggctgaggcaggagaatcgcttgaatctgggaagggcagaggttgcagtaagctgagattgtgccacttcacttcagcctgggcaaaagaatgaaactcttatctcaaaaaaaaaaaaaggaaaagaaaaaaaaagcagtaaaagacttaagtatccatggtgcgcttttccatatcttcttcaatgtgtgttcatcttggagtacagaaaggggtgttgggataagattatatttcactggaagacaggaatggctcagatttttaattgatgaaaaagaggcccccacctgtcacataggaaaagaaaagagccaacagttttttttgttttgttttttaacctgaaagatgtctctgccactgccaaaataactataattcaaacatcagactatgtctattcacatatattagggtaaaactggcattttgtttattagaaattgttacgacattaacaaattagatattgggaagtttttaagtgagtaattggaatgattatctaaagtagtgagttaatataaatgtctstattcatagtagagtgaaggcaactggaattaatttaaaaattaccttccttctgtggttattttttactgtatcctaagtatactttttgctataaagaatcatttgtagttttatgattcttaacagattctaaattatggggattaattagtgattgatagacaaaggttaaaaccttccaaaaattattcatgatatttaggagtagattgaccatatatccattatgtttattttaatgttttctttagaaatgtttatttttacacgacagcactttataatttgagaaaggctacgattcttgctgagaatactttgactttgtgtgcctgtgtgtttctttttaagrcttcaaccgttgtgtgtaaaatgtctggatggcaaagaagtaatccatctggaggcaggtggttaccattctcttgcacttactgcgaaatcccaggtaggaggcaaactattaaatgctttaccttattttcatggaaggccaacatgacattgttggaccctcatttgttgattatctgctatatgtcaggcaatgataaccgtatctcattttagctttccaatattttgtatggtattatttccactttacagacgagggaagtggagtaagagaaattatgtaacttgtctaaagtcacacatacgtaacagtagagcttggatttaaacacttttctgcctgatttaggagctttctataatgtgttctcacctaaaaagagaaccccagattttccagggtattggtgaatttttatttgttacaaagaagatacatagtaaaacactaagaaaataaagtcatttttctttaaaactgtgggacctgaaagtgacctctagcattactaaaaaccatacccatgtacataaacataaagaagttgttttaaatttttttttaaacccagactgctcatctgcaataagttaatattaaatatattcatatttcgataatggtgcttcaccaattcctttatctttttaagaagccaataaaggattcgaagcccttttaatatttgatttgattgcacatttcacatactaggctagccaaaaaactaacataacttgtataaatattaatattaggaaagaaaaaggggaatttactgtttttaacatgattcattcaaaagacttaaaaatgagagattaggaaggaggtcagttacaaaataaaaattactggctttattatatacatataataaaacaaaacatactcgaggaaattctgctcagaactacaccaaaagtgttaaggaagtaggaataagtataaaatgcatataacccatatgatgcaaactttagaactcttttgaagggtcatgaaagcagtagtaaagtgagaggttttatttttggatgagatgcrtcagttgtaaaaatgtcatttctctcttaaatcattaatcagcacagtgaaaattcagtacagtccccaaaatattccagtgtaatatttacaatttgataaaataatcccaaaattacttcagaagaataaacataggtgagccaggtaaaaagagagatttatccttatatattataaaattaaacagatcaatgcaacagaaatatgcctgtcggctagaaataatctcaagtatatatgagaatttaagatataaaagtgggtgtttccattcagttgggaaaacaagacttgagtatccggtaaatgtagtaaatgtttactggcttcgtatttgtaggagaaaactaagatggctatacatattctaattctgggtgtattaatgatgtcattaaaaactagaactgtgtgtatgtgtgcgtgtgtgtgtatgaacaaattaagatgagtcttttaggcatagaaaaagacataacatcaaaactggaaattagaaagtaagatatgtttgtcaatatgataattcaacagtccygaacagcaaataaaacagtgtaaacaaaatgaaaatacgtaacaaactgggtaaaaatatctgcaacatatgtgataaagtgttgctgcacttatatataaaggaacagttgtcaaaggataaaaattgtcaaaaggatatttatattttcrtcataaaagaagtagaaatggccagcaataaatgaaaagatgatcatttagcaaatacatttaaattaaaaaacaacagtacagtgtttttctcacctatgagattaacctatgcaaacctaaggattacattcaatgctgagcattgattaggatgtaggagaaaatgtgcgtgcagtgcaggcaggaatgtaaattggaccttgctggaagagagtttgtcagtatgtatcaaaaatcagaatggcatagtctttgcctaggaatttatcctaagcaaatagatacatgaatatatgtattcaaggatttttcctatcctttttaatattaaagaattggaggctgagtgtggtggctcatgcctgtaatcccagcactttgggaggttgaggtgggcggatcacctgaggtcaggagttcaagaccagcctggccaacatggtgaaaccccatctctactaaaaacacagaagttagccgggcgtgatgacaggcgcctgtaatcctagctacttggaaggctgagcaggagaattgcttgaatctgggaggcggaggttgcagtgagccaagattgcgccattgtgctccagcctgggtgacaagatcgagactctgcttccaaaaaaaaaaaaaaaaaggaattggaaagaacttaattcagtacgtaatttgttaaagtatatgcacagtagagttctagatagttattaacaatgatgttacagatctatacttactgatgtgcaaaagagtaggtgccaccaagtggttgatcagtgattttcactttatttctatttttatttttgtactgtcacagtcttgtacaatgaccatgaattactttcataatcagaataaacaaacattttaaacctagtcattgcaatctagtttcttttgtctgtagtgtcgtgtaggtacttgtgtttctcttacagtaactcttcatgtatgaaaggttttctgttcattccatagtacttttatctacagagtaggaaatcatgattactcttcctctatatcacttaatgtttttattgctttctctaaaagaggcagtatacgataattcctgggattaaatcctgcctcttacatatgaatttgtgaccatgggtaaattaacctctctgggtttccttatttatttatttttgttaggattgttgtgagaatgaatcatcaattaatatacagaaagtgttaagaacaatgtctggcagttagtaagcacctgaaaagtgttagttattgttattgttattgttgactcctcaattctgccttcttcttttcttttcttttttttttttttgggataccgacttttgctcatattgcctaggctggaatgcagtggcatgatcttggctcactgcaacttctgcctgccgggttcaagccattctcctgcctcagcctcccaagtagctgggattacaggcatgcaccaccatgcccagctaatttttggactctgtcttcttatgtaccaagactctatttgcgcattatctctggtcttgttaaaaatgaatttccttaatatctgttaaagagtgaaagactaatataagtacttaatgtataattgttggtatttgtgtatatatgttaattattataaaggttcagagttgatgtgcaaaatcagattcacaacgcttagctacttttctgtgtttttttgataggtttactcatggggtagcaatacctttggtcaacttgggcattccgattttccaacaacagttcctcgtcttgcaaaggtacttttgtgaacttgatagcaacttattccacaattcttagctgtaacaccttatacttctccatttcttattttaaaatatcgggggaatttcatacgtacaacctaaatttgttttggttttcataagaaaatttttaaaaacaggaagccacgtgttttcaagctaaatatccgttttttatgtgtttatatttcttagcttcaactgttsattaaatatgcatagtttctttgtttttttaagtaaaaaaatgaaaaagtgctttcttttaaaacatgtttctaggactctgctgttttctcagcgttaccagataatgtctactctttgaattctccattgtttgacttttacataacattatttgatggtgtaattttgtgtgtgcatttaaaaataacatgcagagtagtaaaacatttttttttgtaagccttttcactttctgtagtaaagctaaaagtagaggtgaattttttttttttttactgttagatggattggttttagtttatgtaatgccattgagagattggtagcttctagtctctttgatgaagttctgtagcagtgtttctccaccttgtgttccgcctcatcaccctgaggaaataccaaattctcatcaattgtactggttccttgaacaagagttttagggtttttggtagagatgccctccatgtgacagaatggaatatggaggtcatagatatgtagttggattctgatatctccccgttcccaagacatgctccctctggagtaatggagattaaagaagggcaattacgtcaattttaggaatatgatttgaatgtgacagttaataaatatgccaataattcatatatgcaatgtgcactgtgcatctgtcactatttaagatttttacatgctgcctttccttttggtgaacttaattttactgggaagaaaaggcttaataaaacattagggaacaattattacttctagctccaatctgaaatgttttcagtataaaacatcgtagtagtaagctattcagtttctgatacattatcacaaacaaagatattgcaaatcattgttccttgttttttgtttatttgaagtgtgtgcttattcatactaaggaaacctttgtaatgtagcatggagacctgaaaatcaaactcctttttaacattttagagcaaacaagagaatagtttgttacaagattttagtttcataactctccgacatcattgggagcttggtttttttatttgaggaaggctgagaaaaacatttttgaagtcatcctgattaatctgtgagaattaaaagtgaaggcagagtgagatttgaattagttttgagactaggaagaagactccttttgcaaaaattgtaatgcgtcctttgcaaaatgaatgggaagtccgttatttggatcgcctgaatttgagaacataatgtcatgccagaagaagactgctataaaattagtagtagacacacacacacacacacaacacacacacaaaatcacctatgatttggagcctagctagatactaaggatctaatagattaggggttgttcgtcagtccaggagtcagtgctgaaactatctaaacacaaaggatctaacagattagagagtgtatttgtgtgtgtgtgtgtgttgcctatcagtctaggagctgaagctgggtctagaggttagaggtagtagtttttgcagtaacacactttctccaaatgaaatcttatgaggaatcccatacataaaacccacaaatgaggaactactttggttaaggatggagtgggggcctagagccctggcacctgccttggcatggtggctactgaatcactgtgtggaatcccgaggtttgaaaattattggtttaaaggcagtggttctcaaacttttgcatacatcagaatcacctgtggagtgcttgttaaaacagagtgctgggctgggcgcggtagctcacgcctgtaatcccagcactttgggaggctgaggcgggcgaatcatgaggtcaggagaccgagaccatcctggctaacacggtgaaaccccgtctctactaaaaatacaaaaattagccgggcgtggtagcgggcacctgtagtcccagctactcgggaggctgaggcaggagaatggcatgaacccgggaggtggagtttgcagtgagccgagattgcgccactgcacaccagcctgggcgaaagagtctcaaaaaaaaaaaaaaaagcgaccgagtgctggactctattccccattccccttcccccagtagctctggggcctgggaatttgtgtttctaacatgttcccaggtgatggctgctgctgctgctgcaaagaccactgagaaccactggtctaagggatccctgtagatgggcttctcaggggctctgcctgttttaacatcctgggagtaggcacagtaaagtcacgtaggactggtagagttccaagtgggaaaactgaattttagcacccaagagtttagttggccagaatagaatttagccttattagtttgttttcttttacctcgatttttgtgcacacagccaaatgtggaaggacagaggtatgtcctaattgtcacttcaagagtagggctctggaagtttctgggtctcttcattataatacagtctgtgcagacttccaaaagtaacaataaaaaattagatgtgtggtttttcctttttaaattccaatttttcagatttttataaaaacagttctaaatttaaaagctgaacaagggattccgtcttactcctgcacctgctctgcatttgattgggcaaattgctgggtaagtttgctctcagatatgactgactgcaccacgcttatttaagcaacctaacgtttcagttcctgtggatccgaagttctctctgattgcctttatcttggacagacactatctttctgtcgttgcagataagcagtgaaaatggagtctggagcatagctgcaggcagggattattccctgtttttagtggatacagaagacttccagcctgggttatattacagtggccgacaggaccctacagaaggtgacaaccttccagagaatcacagtggttctaagactccagtacttctctcctgtagtaaggtgaacaggaattggatcctaaggcccacrttcagtaacacataagaagtcttttgtttttgtttttatttgtatgtatggctaattattagtaagcatctctaactaccttatttaaaattgcaaactcctttcaagcccccttcactccttatcttctctctccaaagggcctatcaccatcgaatacactrtataatttactcactttgtctattgtctgtcctccttactataatgtaagattcagaagggtagggattttaggctatctcattcactgctgtagcatagtacatactttrtaaatattttgatgatatttgatgagcatagtacatactttataaatgtttgttgaattaacaccctcatgtaggaatattggaaagtacattttactatgaagtttcctgactgcagccgtagagccctcgaggtgaattagaaatagagtagatgaatttctaactattaagtgggaagtaacaatgcaagagcctgagataggctcatggcagaccatgagagacccaacagacaaccaacagtgttctgtttttccctgcttcacttctccacttttaatttaattaaattaattaatttatttttttgagactgagtcttgctctgttgcccaggctggagtgcagtgacacagtcttggcccattgcaacctctgcctcctgggttcaagcaattctcctgcctcagtctcccaggtagctgagattacaggtgcccaccaccacgcccagctaatttttgtatttttagtagagacggggtttcaccacgttggtcaggctggtcttgaactcctgacctcaagtgatctgcccgcctcagcctcctgaaatgctaggattacaggcctcagccaccttgtttggccttaattttatttcctactgtttacctactgtttatcccctttttatttgatctgctttcccactctgttttcccttcttttttgtaaactgaaaccattggcttatttctagctttcttttccccataaagtaactcacattctcaaagtgacatgctgcagggaaattaacccccaaaactagtatattctaggatttcttatttttattaagtaaaatagcatatgggcttttttttttagtctttgtgtttgtttttctggctagtaagttatgaatgtgtggggacaagatctttcttgctaaaggtaacattgggaccaagtacaatggttcatccctataatcccagaactttgggaggccaagactggaggatcacttgaggccagttcaagaccagcctgggcaacatagcaagaccctgtctctaccaaaacaaaacaaatttaaagattaaaggcaacattggccaagatgtgtctgtagttgccagtcctggctttacattccccatgaatgatttcacagtctagatagacgatcaaataggctgatgaaaggaatgaagctctcgtgtgtgtctttggttaycatgggatgttaatagtgcattgggtctgtagcttgcctgcctgatttaatgggatatgtgaataaagacatggaatgttttttatacagtggtatctggggtaaatgacaaaaagtccctttttaagaaaatctcttttcattgtacaaaaggcaggttaattcttagatcctagatattttaatatatagcatagagatcctccctggtctcattaatcttattttactcggaaagtggtcctgagacatgtatccctatcatttggatctttatatatccagggggtctgtttccaaacagttgtaatgtgaaatgaaaggtatcttggagataattgaaagtaggtgtgtatagttatgtatagatctggatatgcatatataacaatgatgtactgatgaaccagctctaaaaaaaagcgaccccgacgacccccccaaaaaaaaccctagtctgtggtgcttgcagattttcactatggccaattttcaagctgccaatggtttaattacttgcttgcaaattttctgaatatttaacagttagctcttgtcagctgatataagccagcttcagtataccaaattagtaacataattatatgttatatttaatccttttgttttcttctgtttcagcttggatatataagcagagtgacagcaggaaaagatagctatttagccttggtggataaaaacattatggggtatattgccagtctccacgagttagctactacagaaagacgattctattcaaaactaagtgatatcaaatctcagattctcaggcctcttctcagtttaggtaagttgcaaccccctctctcccaccattaaaccatcaggtctttatctcttcttcctatgtcacaaataatgaaaacctgttagtttatggtttacttcttkctatgcactgtctttgtgtgtgtgtacacaggtagtcaacaatttacaaactgtttccaatttgtcaatagcctcactgcccctgccctgtcctaccactcccagagctcctgcggcttccagaagtagaaaatggaacttttaggatattcatggcagaggaacaaaaacaactttgggaaagttgaccctacataaagttagacttccaaacaacacttctccccctgctggtcctaagagatcttccagtatactatctgaattttttattttcctcattatagttcttagaattgtatcaagtagagatttatttggatttacaagtagtctcttaaagttgtggataactataagagtgttaaagctcttatccgactgggcttggtggctcactcctgtaatcccagcactctgggaggccgaggagggcagatcatgaggtcaggagttcgagaccagcctggccaacatggtgaaaccccatctctactaaaaatacaaaaattagccaggtgggtgcctgtaattccagctactcgggaggctgaggcaggagaattgcttgaacccgggaggtggaggttgcagtgagctgagattgtaccactgcagtccagcctgggtgacagagcaagactccatctcggggacaaaaaaagatcttatccctcagcatgagttgattaaatctgattctttttcttagctatgcccagctacaaagaggttggaagtgacggggtaatacagaggcaatgggttacagtagtactagatgggatgccactgtccagatatactgggtacctgggggtctctgggagaatagaaaggaatgcagaatggaagttgagggaactgttgcagataaacttttcctatttcaaattttttttctgggtttggccctacagtcagaaaacaggaagttttctttctctttctctctcctgcactccttgccccactgtgttgacccagaattcaggttaattctctagtacatcacttttgccatgttgaggacattgtcttctgcaggtcagcccattgtttctttcttttttttttttttttgagacagagtcttgctctgtcacccaggctggagtgtagtggcacaatctcggctcactgcaaccttcacctcctgggttcaagcaattctcgtgcctcagccacctgagtagctgggactacaggtgtgcactaccactcctgctaatttttgtatttttaatagagacggggttttgccatgtttcccaggctggtcttgtactcctggccttaagtgatctgcctgcctcggcctcccaaagtggtgggattacaggcatgagccaccgtgcccggcctgcccattgtttctagtggaaaaacatcttttcaaacaactaatttacagtctttgtgaatataatccctttgtaagctgaggactgtctgcatttgtgtttttgtttttattaccttctgccttttaagtgttgtggagtctctgttctataaattcccctcctctaggtaggctgaacactccaggactttgccaagagaaaggaagcaatctaagctggaagcttcctggattgctctgaaagaaaggttaaatctgcctctttcctgtcctggttgctgatttctttgttggtcttcccagtctactttcctaattgcttggaaagaagtcctagaaatgaggaactttagacaggcaaaaagcaaataatatcctggtgccmtctctgaaattcagagcatcctcagtggtccaatgtttggattgccttctctgcactgaagggttgggcttttcaaagaggcaagtagagcagaagtcagaacaaaaaagctgaaaatgtttacaaagatataactccccaagtgagtttaattcctgactgtcactaatcagtggcttaagttagataattgacttcccttctcttggcttcagattacttatcttcaaaatgaccagagagttgcattagctcagtggtyctcaaatttggctcatctttaaaatcacctggagagtcttttttaacagaaaaagccatcctggaatctataaggttcctgtgaatgtgtttttaacaagttcctcaaaggactggatactgtgatctttgaggttgctttaatactgtaatcatttgggttccttagttgagagcacatggcaacaggttaagtagtcttagagraattcataatcataatcayatcataataaagtgatcggttttcagtttgtgttgtcatcatcatcattattttgttatagaaaatttgggcactacaactacagtccagctgttgcaggaggtggctagccgattcagcaagctgtgttacctcattggtcagcatggagcctcattgagcagcttccttcatggggtaaaggaagccaggagtttggtcatcctgaagcattcaagtctcttcttggatagttatacagagcaagtatccagtcccgtgtcatgttcaatctctgcagggttattctgccaaggagaacagctccttaatcagaagagactagattagggagagtgatataaggtaatagaaattgcaaagcagtattttaatcttaagccaactatagttctggattgctaaaatttagtcttctctaaatgaaaaaaaatttaaaaataatraattatcatgttttcttctatattctagcagagtgatagcataatttacattaaatgtactataataagtctggttctttagaaaacaattttgtttacttaactaaattgtactaaaacttggaagaaattagtaactaaacaaattatttcaagaccaactgctgattgtaaatatggagctgttctgatgtctgcttttgacttttatataaatggaagttttaaaagacccaactatttttaacatgaagatgtttttccttaataaaacctggaatagttattcaaggttctttgcatatttttcaagcaaaatatcccaagtgtacttgaaaatgtaacttaaaatgtttctcacgttttcttaacttgtattttgatatgatgatgtgaggcataatttaagtgttattttaatgtatgttaggttatgctttgatctgaagtatgtataggttttgttctctattcattcacacctcaaccatccagcaaacactgagtgcccactcagtgccaggcatttgcggggagctccaagcccacagcagcacagcatggggcctgcgaaaagcaccagccctcagggagttcgtgttttgttggtgttttgttttgattatttataacataataacatgtgtttattactgaaaactgcacaaataaagataatcaaaaatcacccataatcctaccaccagaactaaccactgtttatcatcttagtgtatttcctttccaacctatataatatgtacagatagttggatgctattttaattctaagcaaaattgaaaatatttgaagctgttgtcaaagaggaagtaccctggtttgagtattttaactcatcatctttcagaaatgaaaaataaaaataatagaacttgatactagtttcttttttaaaactagattttgtttctgtgwttccagcttttactggtataattttccttttttgacttgaattcatctcataatacctctatttcacttctttttcttctctggtactttaggccttatgcttaaaaatgcttttgatactttgggctttttttaacataacagkttattcctatagatggggcaagtaaaatatttgggtttatgtatgaatctttaaaattatktttataattataaagttattaaagcctggagtgcagtggcaccattacagctcactgcagccttgacctgccaggctcaagtgatcctcccacctcagcctcccaagaagctaggactacaggtgcatgccagcacatccagctaattttttwaattttttgtagagatgggggtctcactatgttgcccaggctggtctcaaactcctgggcataagttatcctcctgcctcagcctgcaaaagtgctaggattgcaagtgtgagccactgtgcctggcsaaaattattttyaattgtgataaaatacacatcacataaaattaaccattataaccatatttaattgtatagtactgtgggctaattttastaggagtttcccttcttcctcaaagtcagttgattccatttgccagcccaagtgtgtacaagaaatgtacagggctcaaagcagtataactagacttgttctttagcagcatatcaatatttaatcaacattttctaacactgactcaagcacttttaacatattttcttaccttcactgtcatttcttttttcttttttttttttttgagctggagtttcgctcttgttgcccaggctggagtgcaatggcacggtcttggctcgccgcaacctctgcctcccaagttcaagcgattcttctgcctcagcctcccaagtagctgggattacaggcatccgccaccgcgcccagctaatttttatagttttagtagagacggggtttcaccatgttggccaggctggtctcgaactcctgacctcaggtgattcacttgcctcggcctcccaaagtgctgagattacaggagtgagccaccgccccyagccttcactgtcatttcttaattgggaaacctgaagtgaagattacagaaaattttcatcaaaaattcaactattttaattatgttttctcaagtatgttaattaarttaccacgtaatagatattgcttggtagataccaagtaaattactgcattttctgcttagctttaggtgtttttaaaatttccttttatattaccatctttttttttttttttttttttttggggagacagtcgtatcctgtcactcaggctgtgcaatgttggaatcacagctcactgcagcctcaacctcccaggctcaagggatcctcccacctcagcctcccaagtagttgagactacaggcatgtgccaccatgcctgactaatttttctatttttttgtagagtcgggtttccccatgctgcccaggctgatctcaaactcctaggctcaagcgatcctcccgccttagcctcccaaagtgctgggattacaggtgtgagccaatgtgaccagccttatattaccatctttactaagctggaattcccctaccactccctttacctccattattgtaattattacacaacctgcccttcacaaatgttgacatcacaaaacttctgaaattcattggtgaaataatcaagaattatctattccaggtatgtgtttggaaactgaagaactaatttacatttcaactaatgtacatgtgttttcttttctgctcaaggtattgcacatctattacmaatttcctggttatgggaggattccagcttcttgctaagcctgccatgtaagcaaacccacaccttccagttatcattctctccgccaaagatgacattttatagtgctctgttttcgagtgctcagggaaagctttgacttcatcattttaccaaacaagtcaaaatataaactttcagtaagtcttataaaggacaggtactattagccactggttatcattataagtagtatgctattgaaaaagtactgaatgactaggctcaggttcggggtccttctgtgctatccytgagactttggacaactctctttacctcagtaggcctagtgttcttcatctgaaaaatgggaatgttctctcccattggagaggaacaaataatgtatgtgatgatgcacagaaaaaagtgtttgcgcagatacaacctatttgcatttagcttctgggtaaataatttaaaggctccttacacaaggcaataatcctgaacagatagtttctcaacaagtgttgacccagcaacaaagccaaggttttaaaaattctgtatttaagttttttttatttttaaaatagaagagatagggtctcactgtgttacccaggctggttaggaactcstgggctcaagggttctcctgtctcggcctcccaaagtgctggaattataggcatgcaccactgtgccaggccaaaaattctgtattttaatagaaaatactttaaatatgtacttaccacccagatttagcagatgttaatgttttgccatgtttgcttttttttttttgagacggggtctcgctctgtcatccaggctggaatgcagtggcgcaatcttggctcactgcaacatctgcctcctgggttcaagcaattctcctgcctcagcctcccaagtagctggggctacaggtgtgcaccaccaccccgaactaatttttgtacttttagtagagatggggtttcaccatgttgaccaagctggtctcaaacccctgacctcaagtgattcacccacctcggcctccaaaagtgccgggattacaagcgtgagccaccatgcccagccccatgtttgcttttgattttttatcctaatagaaggaatgctaacattctcatctcatttctagttttaatgagaatacttttaatatttcaccattaaaaatgattactttaggtttttggtagatataatttatagggttaaaaaggccctatttctaaaagttgtagaggaatttttataatgttaaatatctgagtttccaaattccaaaattcagtaatcttaatgtattaaggttttaatacattgctgaattaaatttacttatacagttgtctcttggtacccatgagggattgactccaggacctcccaaaggaaaccaaaattcaaggatgttcaagtccctgatataaaatggcttagtatttgcctataacctgtgcacatcctttcatatatgttaaatcatctctagattacttataacatctaataaaatataaatgctatataaatagttgtwatatggtatcgtttagggattagtgacaaaaaagtggtagaaacataatttttttatgaaatatttttggtctgaggttgttgaatctgcagatttggaactcacagatatggaggagctttttctccttttctgtttcctggaagttcatagtttrtatgaagtaggaattatttgtactttgaagatttagtagaattcatctgtaaaaataatctaggtttcatgggggcatttgctgtagggagtttttactgatttaatgaataggtatgttcaggtctttatttcttcttatggcttttgttatttatatttctctggaaaattgttcattgcacccttgttttaaagcttattggcataatgttcctaccatagtcttaaratgattacaccagaataactgtagttgtaccccctgtttctcattcttacgattattcatttgggccttttatcttttttatcttgatcagtcttgtcrgcagtttacccctttttaaattaattttttcaaaaattagggaatcatttctttcgcttttaaaaaatttcattaatttctgctttttatttccttctactttctttttgttcacctgttaacttcttaacaacttctagtttagcacttggttcattaatttttcaaatttaaaatttttctaatgtagccatttaaggctataaatttccctctaattgttgctttagctgaatcttacaagtcttagtacgttttgtttttatagtcattcagttctaaatattttcgaaagtatttttctaatccattatgaattattggactcacatgcttgttgatttccaaaatataggggtttggcctttatttttttaaaatgacagtttcaagaatatgtctttaaccttatgtagtaactttaaaattcttgatcttaatacaccacaattttccattcttttactttcagcctgtctgcattgttttgatatatttcttataagcagcacatggatggacttattgtttgttgttgttgttgtttacatttgagaacttctggttttgacaagtttacatttgtaattactgattttatatttattattttaaatatctttattataatgaataaaatagcttagttaacctataatgttggtgaaatgctgaatcatagccaaagaaaataggagaaaatggggctgtagccaaaccaataattaaatggagcagaaagaaaattcaatagttatttttgcaaatagtaatgcttgaagaaaagcaagtttaattacaggaagatgcaaaaaatagatggagacttgtgacagtttaaatggaaagcttctgggcttcctgaagggctacagcagttactgaccctggttccttattctgctgttgttgaccttcctctggtatttccgagttagattcacagtactgaagaattgaccttgttagagcagaaaaatgagatgacataagttgaaagcctcttgccttttgcacagcaccatgcccagagcctgggttttacatagttaaaggcagcaatgacatctttttccaacttctgtttacaaagtcaatatttaaaattaccgtaaagatttcattttcagaggagagtttgagaatgtctaaagcacagctaggctgcccacatggctgttagtggatcttggatgatgatgcacaagcacttatcattcatctaattgatcactcagctgctcacatcaggcttgcctggtggtttgattattatgcaagtttttttcytaatgtgataaaatatatgtaatgtcatatttatcattttaatcttaattgtacactaataagtgtacaatttagggggcatcaaatacattcgcaatgttgtataaccatcactattttttcattatctctgagaaaaactcagtgcatgataaataataactccccccatactgtctccccctgcctgcctggctctggtaacctctattctacttcctctctgtttgagtttgcctrttctaggtaccttatatgagtcgaatcacgtatttatttgtcgttctgtgtctggcttatttctttaagtatagtattttcaaggttcattcatgttgtagcatacgtcaaaatttcattccattttatggctgaataatattctcttgtatgtacacattaccacattttatcaatcagttcatctgctgatggacacttaggttgtttctacctttaatatttttttattttaaaaatctgagtaaaaagtacagaccttgccatataaggaaagagtgatattgccactattagattaaaaactcccaagaaaagataagctgatcagagatggtttctggttcagatttcttaggagtgtagcttggcctctttcggggaagattataggtaaggacatgagtgagtcctggaaagtaatggagttcacaagagttggaacatttctggtctactgtagactgggtactgggtattgaggagaaatatggtccaagggagtttgtgttcactatatcttacctccgtctctcaggagcaggtcaaagcagaacacttgtgtaaaattaaataagtcctcagctgatctctgcagtagaacgtggagaaagaagtaggaacattagcaccagccaaatataaataaaatctgggcactttatctaagatctttttttttttttgagacaggctggtcacccgggctggtgtgcagtggcacarccacggctcactacagcctcaacttcctgtgctcaaatgattctcctgcctcagccacctgagcagctgggactacaggtgtgcgcttccatgcctggctaatttttgtattttttgcagagacagggtttcattatgttgctcaggctggtctcaaacttccgggctcaagctatccacccaccttggcagcccaaagtgctgggattgcaggtgtgaaccactgcacccagctcaccaactcttactgctttaccattaagtattttggtttggtgagctaagcctgaatgggttattgatcagcattaaaatttggaataaaattttaacaatgaatttattaaaaactgaatattagctaatttttggcttcagtttgaaatgcttttgaagatctcagcattgaaatcttcacatataatcatctttattgtttcttgttaactgtaatactagttcttgcagctttttattactttcctataataaactcttgttaggtgatcaataattgaaggaaaaaagaagaaattagaagtgttttaatatccacactaattctgttggagcaaggagctttgctttttcttccagtgtttctatttagcacagctgcctagaacaattagtcttgccatttattgctgtgacttttggctttgaaattaacaggtaatggtgtcagctggtctctgattattcatcttaaattgttggatgcatgattcatttcctagaatataggcacaagtctgtgattaaccgtttgtattgctaccatttgctacttttcatactaaaaatcctgtcttatagatagggaaattcttttaattatatctggcttatttcattgtatttctactttcacagcacctaaaaaatgtgcattctgaaagaggtactttctagtgaaattttttatttaatgtacatattaccaattccaaaatgattaactaaatttttttttcctctgcctctagtgatttcctaaataaaaaccaagagctgttgcaagatttgtcagaagtraatgacgaaaacactcagttgatggaaatactgaatactttgtttttcttgccaatcagacgacttcataattacgcaaaagttttgctaaagcttgctacttgttttgaagtggtaagctcccatgtatacctctttggacatttggaaagccaaggatcatagttgtttgtatggattatgccaccacaagatctggaactccagtaatttaatatttacctgtgtctaattaaatttaattttcttcagggaaatgacagaggaaagtatgactgtagataaattgagttttctgtggattcagtttccctttagggccttatcaagatgaataaactgtattcattttatgaaactgtctaaagttgagactctatcagatgctactcattcagtagttgtcaaaatttattggatgcatgctgactatgagttaaacagagctctttaaagccctggctttctgtataattgcatacaactgtaaggcaggggtgttacccagcctggattcatgctagactttatgccaggtgtttaggttaccttagcaaatgctgagaggaatcagttacaggattttctcaaatgttaactagtccacccttacataaaactagttaggtggaatcctaggaagttagcaccacactaggatatagatgtatgttaaarctggtcctgagacattcacctttcaaatcccatcgaaatatgtgatttcattttgtttctaccctgaaaggctctagaaaaattataatgactccaaagtcccttataggttttttttattgttgttgttgtttgtttgtttttgagacagagtctcgttctgtcactggggctggagtgcagtggcgcaatcttggctcactgcaacctccacctcccaggttcaagtgattctcatgcctcagcctcctgagtagctgagattacaggtgtgtaccacaacaccggctacttttttttttttttttttttgtatttttagtagagatgggatatcaccatgttggccaggctggcctcgaactcctgacctcaagtgattggcctgccttggcctccgaaagtgctaggattacaggcatgagccaccacgctggccccttgtaggtttagaatcctcttaatctttgggtctgtctcttgatctaaacagatttcacccctcagagtgacccaggaactgattgatgtaggctttctacatttgagcctgctgtgaaaccagactaaagaaaagacctacaaggtctttaaactgatctagctttagctgtgaaggtttgacctctcaaatatcccaatgagatacagctttcacctcaatatggcctcaattaayaaaaaaattttccaccagatcagcttagaattgttgagagtcagagttcagtttccctggatgtagctttcatatgctttatatttccttcctgaaacactcccactcccatcctcattctgggacaaaagtcattttatcatgaaaataaagccctctttgactrtattsgttctctttcacctatccatctctgaaggattatttactctgtgttttgctaacactttctttctctattattcacttctcatgttatatcaatggcccttatccttatcacaggggttcaaaatcaactgtggaagctttttcaaaacaaaacctgcctgtattccatcactatacgttataatttagtaagtctaaggcacagccttgacgtcatatatgtgtgtacacatatatgtatttttttaaatgtctccatataaaaataatgatgatacttttattgaatgaattctatatgccaggcactgttctaagcaagttatatgtattcatatatacatataactttaatccccacatcaactcggtgaagtaggtattattattattaccgatttcatcatcagccttttacagataagagaattgagacacagctgagaattggcagagctagaattaatatccaggctctggttccagaatctgtcctcttaacctactttcctagattgtcttttatgatatataacctattaacaaaaccactgcattattctggtacattttttatcttgtctaattatggtacaaagatcataccttatttttttttccctagcactctagcagaatgttttatatgtggtagatactcattaaatgtttcttaaatgaatggaaaaaatgaaaatgagtgactctcagaattgtagcaagtaaagtaattactcataaacgtgagagatcatcctttgatcttaccttctgctccctcgctacatggtgtagcggttacacccatcccagtagttgtttctcaaaacttggtttgcagacccctggggcttccaaagactatttcaaggggttcacaaggtcaaaactattttcatgacaatactaagatatttgccttttccactgtattgtcatttacactgatggtgcaaaagttaaggtgggtaaaactgctggctccttggtaggaatcaaggcagtggcaccagactatactagtagtcactgcgttcttcactgccatgcagttgcagttaaaatacaatttcgcttaagaatgtcctgttatgtgtggtgacatgcaaagtacatgtaaagcagctctgctgcatgctgaagtgtggcagtttttcaagaaaaagcatgactgtgatagttgagttgagagctcctcttgaaataaatgggttgcttttttttttttwaaacttgaaaggacaattgacagataaactgatttttcagatttggatattggcagatattttctcagaaatgagtaaatgaacctgtcatttcaaagagaacaactgatagtatttgttgccaataataaaatctcaacttttaagcgaaaattagaatgttagagatggatctgccactgtgagtctgacagtttcctgatacttaggactttatctcatgagattggtagttctattatcctgtgatttttgatgttatagaaaaaaaggtatcaacatttggaaaatctgcataattcagtcaaccgatattttccatatgtccaatccacaatcatagatggtacaaagccatagatggtaaaagacccattcaaagtgcatgatagacccctggattttaacatcacagggtacaaaaagctcattgctgtggtttcagattctacattgcagctccctttaagaatctaccacatagcaagttttaatatagtatcaaaggagaatatccacatttatttgaaatggctattaaaatgcttccctctattccagatatatacctttataaggccacattttcttcataggttttaaccaaacaacatataacagattaaatgcaaaagctgatataaaagtccagctgtcatttttaaagccagataataaagagatttgaaaaaatgtggaccattgccacttttctcacaaaaaaagttgtttttttttttttttttttttttgagacggagtctcgctctgttgcccagactggagtgcagtggcgcatctcggctcactgcaagctccgcctcccgggttcacgccattctcctgcctcatcctcccgagtagctgggtctacaggcgcccgccaccacacccrgctaatttttgtatttttttagtgaatacggggttttaccgtgttagccaggatggtcttgatctcctgacctcgtgatccgcctgcctcggcctcccaaagtgctgggattacaggtgtgagccaccgcgccctaccattaaaaaatttttgtaagtgaattaataaaagcttctaacatttcttaattttatgttctaatatggtaaatatcaatagatacagtccacataagaaaaataaagggatcccgagaccaaaatatttgagaactcctgctctatcctggggtctctgctgctctattcactaactgccaggttttgtctctgtcacctgagttatgcccctatttcatatgtacttttatgtagtagaatttttctgaaaccaatctccttttcccagtctcctgcagtgcgctacttatgctcgtgggctgaattttctcctacatttaatactatatgtctaaggcagactgaggctacagattctgcataatggttttatgttctttttttttttttcctctttaatttttgccctgtaggcatctccagaatatcagaaactgcaggattccagttcttgttatgagtgtcttgctctccatctcggcaggaaaaggaaggaagcagaatacacactgggcttctggaagaccttccccggaaaaatgacggtaagccatgccagttgtcatttgttaccctagcaaacagcaaccatttcgataacaattgatacaattttctctgttcctcacttgtttgtggtaataacsttttaatgacccctttcctaaaatgtctaaggaccatactaatgggtactctaaataccttctctcatttctagaaatcctctctgaagacttactcaccttctttagtttgtttttgtcttctttttaatctcctttgagctctaattttgtgaagtgtttagatcccatataaatttagattttacaccaagctaagctacgaccagcaaaytcccttaaatgtgatttgtgtctgttttattttctctttacatgttaaaataattttgattgtttgacttgtattatatttgtctttaattccaggattccttgaggaagccagagcgtcgactgctgtgtgagagtagtaaccgagccctgtctctgcagcatgctgggaggttttccgtgaattggttcattctctttaatgatgccctggtccatgcccaggtaggctggattcctaaccttaaaagaattcctgaaaggtggacccctatccttattaactgtactatcagtttatgttcaaaactagtgtgattttactgaaactgttgactaaaagaggctagccatcattctcagcaaactatagcaaggacaaaaaaccaaacactgcatgttctcactcataggtgggaactgaacaatgagaacacttggacacaagaagggaaacatcacacaccggggcctgtcgtggggtcrggggaggagggagggatagcattaggagatacacctaatgtaagtgacgagttaatgggtgcagcataccaacatggcacgtgtatacatatgtaacaaacctgcacattgtgcagatgtaccctagaacttaaagtataataataattttttttaaaaaagaggctattttagctacagcatggatttctgtatgcgttggatttcagagaacttcttaagtttccagcttgagaatgagtgtcagccatgtgaagagggccctgcagcagagatggcaaggccctttgggttagctgtgttatggggacaatgtggcagaattggtggcacctacatgggcttaactatttcaaggggttctgcagcagagactgcaaggcccatgtgggttaatgacatgaaggggatatgggcagagtccccgaggtctacatgggctttcataaaagtgcctccrtgttctctgtttcagttctccacgcaccatgttttccctctggccacgctgtgggcagagccactgtctgaagaagctggtggtgtgtaagtgcgtcccccctccccaccccaccccgtccaagtctgttacccaggttgcttccttaaatgtgaaaaaaagctcaggaaggcttcggagacagtctcctcattctgtataatgaggcccacctctcagcacattagacagtaaagtagtctattgataataaaatggcctgttgtgaagatcatggcaagtcacgattaggtgatgaaagggcatcttcattgcacacatccccatcgttcagcacagagcagagaattctttgttctttccaccgtggtggcgcccaaaaccaagcaagcatttacattaattgatttctgttcctcttgaaataaagaggttgcttttcatatttgaggatygatactgtaatgacaggttgttaaatgtcctggtatttatccttgtgaacgttttaggaatggcttaaagataactacacctgaggagcagttcactctcatttcatctacaccccaggaaaaggttagtctattatggtattttccttcaatcttcgccctggctctttctgcctcttgtgtaataaagaagaaatataaattgttcttgcttgactaatgatgcacagttctgtctgataaatcttcattaacccaaaactgtaggttcttcattgtttttttttttaatgtgacttaattttaaacatatagcagagaaatacaagagccagtcaatattactctattaataagaaaagcattaggacacaaataatttattcacaccaaagaaaactagcaggatttaaagcaatgcttgatgaattgttgccttaaacttattgacgttactttttgctcctagacaaagtggctacgagctataagccaagccgtagatcaggctttgagagggatgtctgatctccccccttatggaagtggtagcagtgttcagagacaggaaccacccatttcacgcagtgccaaatatactttctacaaggatcctcgcctaaaggatgccacctatgatggacgctggctttcagggaagcctcatggcaggtgaaaatgttgaagatttatgcctggggtgaggatgatcatcacatgatagaaaaagtattaattatctgaaatattagttgacatgcattattctttgcttatgcattccagaggggttttgaagtggcctgatggaaagatgtattctggcatgttcaggaatggcttggaagatgggtaagaaaattgtgtaaaacatgacagtaaattcaagttcggtaaggtcrtaaattatgttattttgtatgcagagctgcttttcaaacaagtagtagatttttgttgttattttttagaaatgcacatgtatgagcatgaagagagccaggagtgaggggtacagcctctgatttacctagactgggtcattttccctgatagccgtgtgacctcaaattacacagccttccatctgttaaaatggggctatgttttctattcatttctcagttgtgaagactgagatctttggtaatgttaatggtgggactattgagatggtagtcctcctttacacaaaggacatagaaaaattttcctttcagtcgttttaagtcatctttaatttctgtgatctgttaaaggagaaattttccaagtgctatattatctcaatgatgctctaatgactttttaaaaataagtttatcatgttttctaacactgtaaatgtatttacatgattagtttatggcagtattttgtataatgttaaggaagtaatttagtatataaaaaatgttgggtaggtgattttgtgtgtctgtgtgatcatgtaaattcttgtgatgtgttaaaatctctttttaatagattgttagaatgagaagagactttagatcatctaatttacccactgagttgcccctcttattatccaaataaaggagctagatacctgggcttaccgcatggtggtgcaggtaattagtgacagagataggtgaaggacacaggtcttctgtttttcactggagttggattaaaacaccatatcttagtgtagtggggctgatgtcccactcctcttgccaaacagcttaggttatagattcaccttaaaccaagatgctgttttaaccctttactcctacaggtgaatgttttctctgtcttccttgttaaaatgtttaccaggatatacatacaaaaggtgaatatgtcataaatgcatcttcttttgttattttttctttttcatggcaggtatggagaatacagaatcccaaacaaggcaatgaacaaagaagaccattatgtgggccattggaaagaaggaaaaatgtgcggtcaaggagtctacaggtaacattggaaaggctgttggactggtgtttgtttttcatataaccatgtaaacctgaatgtttgcatagccaaaatttccaagttttaagttttgtttagtcttatagataaaatttagaggagtaaataaaattgaaactctgtgtgatcatcttttaaaggttaacccctcatctatcgcaggattaaaatactggattattaaatttagttcttatctaaatttttttttttttttttgagatgaagtctcgctctgtcacccaggctggagtgcagtggcgcaatcttggctcactgcaagctctgcctcccaggttcatgccattctcctgcttcagcctcccgagtaggtgggactccaggcgcccgccaccacacccggctaattttttgtatttttagtagagacagggtttcaccgcgttagccaggatggtctcgatctcctgacctcgtgatccacccgcctcggcctcccaaagtgctgggattacaggcatgagccaccgcacccagccctaaattttatataccttataaaccataattttatgaaaaaatggtcttatctataataagacatataggattctaatggacaaaacttttattcttccctcttaaaaataactcattatttcattttcccataagagaataaaaacacattgtttttcatgttaatgcaaaataccacacatggtgtctttaactttttaactttaatcattcgaaaatgaggtttttttaattggtgaaaaataatcatataaacaaataattatagctaccagtgagactgagtatggttttggattttctaaactttgtaaaaatgagcatcagaattcaatgtgcatgtgataattatccattctttccaaccacagctatgcttctggtgaagtatttgagggctgttttcaagataatatgcgtcatggtcatggtcttctacgaagtgggaaattgacgtcctcttctcctagtatgttcattggccagtgggtaatggataagaaagcaggatatggtgtctttgatgatatcactaggtacagtattctccttctattcccacagtttaagccaatgattaagcaccatcattatttaacaagcagtttatacttattttgtctttttcatggagattagtaagatttctttgagtttgagtaggtgaaaaatgaaccttcttttatgacaaacccttttatttacttttttattttttgagacagggtttcactctgtcacccaggctggagtggtgcgatctcagctcactgcaatctctgcctcctgggttcaagggatcctcctacctcagtctaccaagtagctgggaccacaggcacacaccaccacgcccagttaattttttgtatttttggtagagatggggttttgccatattgtccaggctggtctcgaactcctggcctcaagtgatccacctgcctttgcctcccaaagtgctgggattataggcatgagccaccgaatccagcctctttctttttaagttagcaaacttttgtgtaagaaaaacctgtgcataggttttattctgcttattacattttaaatgaaattatttagagttgaattctagaccttctttttaaaaattatgtattttaaagttaccaagtaactacctgggatatatacagatctgtgtcagaccacaacattaaattcctcagagaggattactgagtgagatgtcttttgctatcactttgtcccatatttgaggagacaaagttaactattttaactagaaaaatggaagcaataccaacctagggttgatgcctgggatctcccatgtgataattgtcttttccctactttatccttatcttcagtgctttttcttttctttttatttctgtgcaggggggaaaagtatatgggaatgtggcaagatgatgtgtgtcaagggaatggtgtggtggttacccagtttggattatactacgagggcaactttcaccttaataaaatgatggtgagtggaatatttgcatgtagttattactaactttttaaagctcctttgtccttaactttttaaatcatcttttgattagtttccaccttcttagtactattttccttcttttaagattccataaggctttggggatatgactgcgtgcactcttaagttactctgtattttatgtgttgtaatttttctcttgtttcttcttgtagggaaatggggttttgctttccgaagatgatactatctatgaaggagaattttcagatgactggactcttagtggaaaggttggaaactagctttctttttttttctccctaataaattcttttactaatttttttttactttaaaaatagctgatttacatgccataaaattcacccctttcaagtgcacgtttcagtgatttttggtcaacatggctgtacaaaccaccaccacaatccagtttcagaacatttccatcgcccaagaaaatcccttctgctcattcagtgacttccatttccacctaaagtcccagccaaccactaatcacccttaatcactctatagatttgccttttttgggccttttgtataaatggaatcatacatgcaatctcctctatgtggcttcttacacttagtataatgtttttgttttttccatattgtggcatgtatagtatttgttcctttttatggctgaatagtrttccaaaactacattttgtttatccttttaccagttgatggacattgggttatttccaactttagactattgtaaataatgctgctataaacttttgaatgcagtttcttgtgtagacatatgttttcattttcatttctcaagtagatgcctggagtgtaattgctaagttgtatggtaaattgatgtttaacatattaagaaactgtcgaacttttttccaaagtgtctgtaccattttacattcccatcagcaatgtctgaggatactaatttctccatrtcaaaaaatatttcttattttctgtcttttttcttatagccattccaatgggtatgaagtggtatctcctggttttaatttgcattccctagtgactaatgatgtagaacatgcttattagtgattcatatatcttctttgatgaaatgtctattcagatcttggcctatttctaaaattttgtttgtactcttgttgaattgtatgggttctttctgtattctggatacatgtcctttatcagatatgatttgtaaatattttcttgcagtctgacttgtcttttattttcttaatagtgtcttttgaaatagaaaagtttttcattttaataaactctataaaaaattttatgaattatgcttttgatgttatgtctaagaagtctttgcctgttggctcaaacctgtaattccagcactttgggaggccaaggcaggtagatcacgaggtcaggagatcaagatcatcctggcaaacatggtgaaaccccatctctactaaaaatacaaaaaattagccaggcgtggtggcgggcacctgtagtcccagctactcaggaggctgaggcaggagaatggcgtgaacctgggaggcggagtttgcagtgagccgaaatcgtggcactgtgctccagcctgggtgacagagcgagactccgtctaaaaaaaaaatgaaagttttatagttttgccttttatatttaggtctgtgattcattttaagataacttttgtatatgggctgagttatgtgtccaaactaatctttttgcatatggctatccaaatttcccaacaccttttcccattgaatcttggcacctttgttgaccagaaaatgtgtttatttctggtctctcagttacatttcactgataaacatgtctctccttgtgttaataccacaccatctagattactgttgattcctagtaagttgtgaaatcaggaatataagtcctccaaatttgttctttttcaaaattgttctggccaatctagattctttgacttttcatataaattttaggactggcttatcaagattctgcaataaaccttgctaagattttgatagagattgcattgaatctatagattaatttggggagaattgccatcttaatattgactcttcaacccatgaacatagaacacctcacagtttatttacatctttaatttctctcggcaatattttccaggtttcagtgtacacatcttgcatttctttggttaaatttatttctaagtattttattgatgctattgtaaagcgttgttttcttaatttcattgctataatataaaaatgcagttgattttgtattttgttcttgtttcctgaaatcttgctgaattcgtttattagttttagtggttttttttgtgtgtggatttcttaggatttcttacatacagaatcatatcacctacaagtaaagacatttttgcttctttctttacaatatggaaggcttttatttctttttcttgtccagttgcactggctagagtctcctgtggaatgttgaatagaaaaatgttaagattggacatctttacattgttttctattttagagaaaagctttgtgtgtgtgtgtttgtgtgtgtgtgtgtgtgtgtgttgagatagtgtctcactctgtcacccaggctggagtgcagtggcgtgttctcagctccctgcagcctcaacctcctgggctcaagcgatcctccctcctcagccccccaagtaactgggactataggcacatgccaccatgcctggctaattttttttttttttttttttttttgtagagacagagtttcgctatgttgcccaagctggtctcaaactcctgagctcaagcaatccacccacctcggcctcccaaagtgctaggattacaggcatgagccaccatgcttggctgaaaagcattttttgttaaagtgcttttccattatctgttgagatgatcatgtggtttttatcatttattctactaatatggtgtattatattggttgcttgtctgatgttaaaccaaccttgctttcctgggatgaattgtacttggtcatggtgtataattttttttatatgttggtgttgctggatttaatgcgaatattttgttgaggatttttgcattcatatttatgagaggtaatggtctgtagttttcttttattgtgatgtctttgtctgtctttgatatcaggataattctggcctcatagaacaagttgggaagtgttccctcctcccctattttctgaaagtttgcgaagctttggtattatttcttctttgaatgtttgggagaattcaccaatgaagtcttctgggcctaagcattactttgtgagaaaatttttaatttctaactcagtttctttacttgccttaggtctatttagattttctatttcttattgagtcagttttggtactttttgtcttcctaggagtttttctatttctctatgttatctactttgttggcataaagctgttctcttagtattccattctgtcttcgtatgtttgtgatgctttaacaaaatgtcatagactgagaaatttatttcttcacaattttgcaagctgggaagtcgaagatcaaggctacagcattccctgtttggtgaaggccttcttggctgaggcctcacatagcaaaagatggaagggcaaaaaggcctaagatagttccctctggcacttttatttttatttttatttttatttttatttttttcgagacggagtcttgtctgtcacccagcctggagtgcagtggcatgatgtcagctcactgcaacctccacctcctgggttcaagcgattctcctgcctcagcctcctgagtagatgggattacaggcacgtgccaccgtgcccagctaatttttgtatttttagtagagacggggcttcaccatgttggtcaggctggtctcgaactcctgacctcatgatctgcccaccttggcctcccaaagggctggtactacaggcgtgagccacagcgcccaaccctctggcccttttctaaggcactgcaccattcatgaggacactgtccctaatcacttcccaaaagaccccacctcttactaccatcacagtggggtttaagtttcagcacagattttagaggagacacactttccaaacaatagcaccttctaacttttttaattctataggctggtagtaataacctgtttcactcttgattttagaaacttatgttttctcttttttttcttgattaatctagttaaatgtcaattttatatatcttttcaaagaagcaacttctagtttcattgatttttctttattttttgttttctatctcatttactgatttttgcactaatctttatcatttccctcctctttcctgctttgggtttagtttgttagtttgttcctccttttgtaattttattaggtggaattttacattactgattcgagaacttcctgaaaagataggtgttaacagctaaaagtttccctctaagcactgcttgtaatttacatcatcccctaaattttgatatattgtatggtcattttatacagttcaaaatatttttgacttttccctgtgtgtgtktttttttcttttacccatggattattttcatatactcttttagacatgcatgtgcccatattttgtttgagttttaaagagttggagactggtaaagagcaagttaaaaaggaaaacaaccatttagtgctttttttctcttgattttaaaaattgagggctgggcgtggtagctcatgcctgtaatcccagcactttgggaggccaaggtgggtggatcacttgaggtcaggagttcaagaccagcctggccaacatggtgaaaccccgtctctactgaaaacacaaaaaattagctgggcgtggtggcgggcgcctgtgatcccagctacttgggaggctgaggcaggaggatcactttaacccaggaagcggaggttgcagtgagccaagatcgcatcactgcactccagcctgggcaacagagtgagactctgtctctaaataaataaatgaatattgaatatatttcctctaaccccacattttattctctgactttacctagggaacactgactatgccaaatggagactacattgaaggttattttagtggagaatggggatctgggataaaaatcactggaacctacttcaaacctagtctatatgagagtgataaagacagacctaaagttttgtgagtaactagtgttaattctggattaattattgaatgtttggagttgtcttgcttttatcaaagctggttaatattttaaaagcaaagtcaagttcttaaagtcttcttttttattttattttatttttattttttgagacagggtgtcactctgtcaccaggctggagtgcagtggcatgatcatggctcactgcagccttgacctcctgggttcacgtgatcctcccgcatcagcttccctagtagctgggactacaggcacccgctaccatgcccggctaatttttctaatttttgtagagactgggtcttgctattgctcaggctggtcttgaacctgagcttaagcgatcctcctgcctcagcctcccaaagtgctgggattacaggtatgagccgctgcacctggccaaagtcttttttttttttttttcttaaacaagatgtaacctccttgaattgtcaactgacactgctttagatgactaaatctgtagtcttgtctgtagtcttggtttagattataagccttaaagcatggatgtttaaaaggaaagttccatgtgtgagagagtgttctttttttttttttttggaggtgggaggggagatggagtcttggtctgtcgtccaggctggagtgtggtggcgtgatcttggctcactgcagtgtctgtctcccgggttcaagcgattctcctgcctcaggcttccaagtagctgagactgtaggtgcacacaaccatgccaggctaattttttgtatttttagtagagacagggtttcaccatgttggccaggctggtctcgaactcctgacctcaagtgatccacccactttggcctctcaaagtgctgggattacaggtgtgagccaccgcgcccagcctgaaagagcattcttaaatggaatctgtacacaacttgattttgaaaagtaaagaacatacacacacacacacaccccaagtggaatagtaaaatctgcatatatgaggaaaaaaaggcaaaatctaagtatattatrcccattgcatttttggctttattttctgttctcccaccatctctccctagatgtggcacaatcacagaagtggacagtttttggcatatgtctgtttttctttattgattgcagctttaattttattattatatttggtagcacctcaggtttttgttcccaaggatatgttttctgtaccatgtttattcttagagtcttttagaacccagtatgtaatgcattttaaattctcattataagatgtgcaaggttcagaaagtccttgttctaacaggaatcaatttttatttttatttttttttaatttttaaatttttttttttttttgagatggaktctyactttgtcacccagrctggactgcagtggcrtgatctcagctcactgcaacctgcacctcccaggttcaagcgattctcctgcctcagcctcctgagtagctgggattacaggtacgggccaccacgcctggctaatttttttttttttttttttttttgagatggagcgtcactctgtcgctaggctggagtgcagtggtgtgatctcagctcactgcaacctctgccttctgggttcaagcgattctcctgccccagcctcccaagtagctgggattacaggcatgtgccaccatgcccagctaatttttgtatttttagtagagatggggttttgccatgttggcctggctggtcttgaactcctgacctcaggcgatccaccctctttggcctcccaaagtgctaggattacaggcgtgagccaccatgcccagccaattttttgtgtttttagtagagacagagtttcaccatgttggccaggctggtctggaactcctgacctcaggtgttccacctgccttggcctcccagagtgctaggattacagacatgagccaccacacctggccaggaatcaattttttaaaattaattctgtggaattataggaggcagagtcaattggtttgctttgtacttagtattccatacactttaatatccaaaaaacaataattagctaaaaaacattcctttaaaattttcatttagtgttttaaaaatagaattaccatcagtcttggcagttttggtcacgaaaaaagcattctcagttgtatgttagaaagtttctgttctttggaacaattttgcacaaaagaaatgattaataaaaggttgatatgactttattagcaggaagctaggaaacctggcagtgccagctgatgagaagtggaaagcrgtgtttgacgaatgttggcgccaactgggctgtgagggcccaggccaaggggaagtttggaaagcatgggacaatattgctgtggccttgaccaccagtcggcgccagcacagagacaggtgagtgaacacctgctcaacatayagcagagcatgttaggaagatgaaacttaagaccagtaagtagtcaaggctcaccacatttaatttaaaagttaatgatttacttcgcttctgagtaagagagattaaaacacactttctttatcttctgttgaactcaactgttaaacctgaacagaatacatggacagttatttatgaactctgaaaagtaaatatcaacaagtagattgaggaagaaaacctgaattcaaagtaccacaaaaccagtggtgagtttacttagatgttttgctccaatatccctcagccagaactcagtgcagcctgaaacgtgaaagcaagtactgtggtgcagacagacagggatacagaaaaaatccctctggttctggctcaaggagtgacaaagggactcctaaaactcagagtggttgatatatactcagttttctttctgtcttttttctctattctctcatgcccaagcctccaggaccttctgtggcagtaatggtagcagctggagcaggcgtgaacaggaaacttgcaaaagtcaaaactcttgagagagtggaatcttcttccccctttggtggctccttagctcaagggaaggccaagccccaaccccattgcatttttggctttgttctctgttctcccaccatctgtccctagatgtggcacaatcacggaagtgggcagtttttggccagaggacctaaaaaggggtgcctgcgaaccagaaaatactggggatgtgatggagagaagagctctgggaaacaagcccataaagttgtttgtgaactcctgggctcaccctagacctgcacatgtatgaatttgatcctaattagtaccaaagagtttgagaaccaagctcataggttgaccactcaggtcccagagtagtcattaagttgtacactcacagaacaaacccaggaaggatgcaaaggctttgagaagtgaactggcattggcaccatggcccacaggagactaaagcaaaaatatctgctgttttagggattctcaatatcacttacacattcagtgatttgctggaagaattcacaagactcagcatatagttgtactcacaagtaagattacagcaacatggtagggacgcacaaccagatcataagggaaaaagacacaggtagagtctggaggaatccatgtgtaagctttccatgatctctcctttctgggatgagtcacacacaacacagttttccctgcagcaaaatgcagcgacacgtgtctcatgtttctgcccagggaagcccactagagactcagtgcccagggtttatactgggggcgggtcacataggcaccctgtgcttggcagttgccaaattccacagtcccagcttacaggaaagcagatgttcaccataaatcacaytgttaatctaaggaaagcaaaacacctttgtcagtatatggaacttttacgaagcttaattcccaagtgccagccaagggtcaaccttataagcaggttcttttttattttatttcatttttataaatagagacagggtcttgctatattatccaggctggtctcgaactcctgtcctcaagaaatcctcctgcctcggtctcacaaagtgctgggattgcaggcgtgagctaccacacctagctcaggtgcttctaaagatagcagtttcaagcctgctatgtttactgttttatgaatgtcaacattctccataggatataaacaagacccagagttttataatgctcaaaatatccaagacattaaccaaaattactcagcaatgaaagaaccatgaaaatctcaatttatttcaggaaagagaatcaataaatatcaacagatgacatagatgttgaagttgtctgacaagaacttcaaagcaactattataaaatactcacatgtgcaatcacaaacacccttgaaataaatattagaacaaatgtatcagcaaagaaacagaagatataaagaagagccaaatcaaaattttggggttgaaaactgcactaaccgaaatcacttattgtatgaactcagtggcagaatagagatggcaatggaagagtcagtgaacctgaagatagatcagtatggattatcaaatctaaacaactgagagaaaaaacatgaaaaaataaaaaagtgaacacagcctcatggacttgtgggtctaaatttgtttccttagaattccagaagaaaaggagaaagaatgggctgggcatggtggcatgcacctgtaatcccagcactttgggaggctgaggcaggcagatcacctgaggtcaggagtttgagaccagcctggccaacaaagtgaaaccccatatctactaaaaatacaaaattagcccgggcctgaatcccagctacttaggaggctgaggcaggagaatcgctggaactcggaaggcggaggttgcagtgagccgagatagcgccattgcactccagcctgggcaaaaatagcaaaactccatctcaaaaaaaaaaaaaaaaaaaaagaaaagaaaaggagaaagaatgagggatggaacattttgtgaagaaataatggttgaaaacttatcaagtttagtaaaaagacgtgaaacccatagattcaagtagctgaacaaactccatcttgggaaaaaccacagataaccatgtatagacacatattaaaattcatggacaaagatcttgaaagcagttagagtgaaataatgggaaatcagcaattcaaatgactgcatatttctcattagaaaccttggaagccagaaggaagtggcccaacattttcaaaatactgaaagaaaagttacagatgtacttgttcatttctctctttttctcctttttaaaattttctttttcaccttcttttctttttttttttcttttctcctgcttttctccatctgcctttcttctttaacttgaccagtaactcccacaagcattgcttagcatttggacctaaagaatttactaatccctgcagcaaaacttcctaattaactgtgactttcttgagtttaattctagataatggtttgtttgagctgtgccttcgttgttaaaatatcaaggagcatactttaatctgtgcgtgtagctacatacagttaatttttaaatgagctttatgctggtcttcatttccacatgtcagttgctttctaaagggaattgaagaaaaattgagcaagtatccatttattcagaatgtaaatgttkgttctgaataattaaatgttctagtttgctaaaagttaccaaattctttaaataaattaccagtattcaaataattttaatatactaaagtatagttacatagaaattaaattccagaggttgaaagatacttcaggaactttaaacatttcacagtcaagtctaacaaatactaattcttattctagcctggagagattagtttagagtytatctaattgagtatctccaaaattgatacttaaagtaaaccatagtataatttttgcttgcttgaaattcgtgtatgtgtttcaagaaattaaatgtagaaagaagtaatttttttttctatatttgggataaataggaattgattttagtatttcattcatgaagttcataattgttaccttctactctatcagtagaagaaatggaaactcccagaattgatgaaagccattgactgccccttgtgcgtgatacagatggtcagcttagtacagcctgtcagttcgaccttaagactttagcccttcagttaacctgggttaactgttgttagttaggtgtttctragaagtgaaaatgaatgaactctttatataaaattatgttgctaccacaaagatcttatatgtttatctaaaatctctaataataatgattatgcacagttttcagtttctcattggttgtcatctaatgatagaacactattaccaaaaatttcagttgattactagcgtgtgttttctcttagtatcttcatccagtttctgtttacccgttatgtgcttacattgtcacctgttggagtgtcattatctccttgcttcttaaccttgttttcatttcttcctttgccctttgacttatttccctttttccttaactcccttccctcttttattccttttattccatttttctgttgtcaccaacgggtctatcaccttcaagctaatattgtatttatcttcaagctaatgtcatattatttccaacaccatggtttagattggagtagaatcttcattaatttattgtagaatcttcattgtagaatgaagaatgaatctttattgtagaatcttcattaatttatggtacaaagtaacactacctgattttttgaatgaatgttatgtaaactgagtacctaatagcaggatcgtgatgatttctgagttcgttgggtttagtactacgttggatgctccactttgactggagctagtgattgygtttcatgtgagtatttacacgtatcttgctttcttgatgtgaaatacaacagacttttctttccctttttatagtccagaaataytgagtcgttcacagactcagacactagagagtttggaattcattccacagcatgttggtgccttctctgtggagaaatatgatgacatcaggaaatatttaataaaggtaaactagagtaaaaattacattggtcttgtgaattaatgattcacctaccacaatatatcattcagatagactcacagcttaatgttattctaatcctgtttttgcatcctgtgcatttcttttgttaattatcaaactrccaagattacatttctacctaaagattgtcccattattatgatagaactttttaaagttttttaaggcactcaagggggttcttaagaaataagattagagttttaaattgctttttgttaataacattagcaaactagagattgtgtaagtaaagcatgctgccctcacccctggagagggtctttgcttccttcgaaaacttgtaagaccagctacaatttaaagtgtgatgtatattgatgggaagtgcaggaaggagtattctgagaagtcaggggaactgaaggatgactgtttcagagtatcatcaacagtcagtgtttagttttctccaaggtaacattttctatcatttttgtgaagtttaaagtatatttgaatctttttaaaattttgtattctttttttttttttagatatgggggttctcactgtgttgctcaggctggcctcaaactcctgagctcaatcgatcctcctgcctcagcctccctagtagctgggactataggcatgagccaccacatccagcagaatctttcttttagtggtattccatatcagtacttccaaagctatttgcccaaaatgttaaggagattctttgatcaagattaggaactccagcttcatataattggggtagacagtactttcaaaaaaaattaaagtatttgaatattcctggtcccaaaattgactcttgacattttgacaattgtgtgtcatttatgaagttgtttcttrttgatggattgtttctgctgttaatgcacatcaactgacttcattgattcttttcctactcaggcctgtgacactcctctgcaccccctgggcaggcttgtggagacactggttgcagtgtatagaatgacatacgtgggcgtaggagccaaccgcaggttattgcaggaggctgtaaaggagattaagtcctatcttaagcgaattttccagctggtgaggtaagagagcttttcactaaagtctgcgggctatggaatactattttataccagtgcttgggtagtttcaccctgaatcatcaagaaaatagttttatgccacagtcctttaatagattaagtaaaacatgttttaaatgtatgtgtaagctataaacataaaaaagatgaaccttagctattgttatttatttatttttatgtcttattaagtaaagctaaaataaatgtttggggtttttaaatctaattttggtatgaagtatagtagtcgtcttatttagattcagtctctaggcaaaatcatgtatctaaaacccaaccacagagtagacaaagtttaatatraagttttgtccttgagtttttgtgtcttgtcctttggcaacagtatcacatatgttcatttatttaacaaatatttatggagcgtttctatgtaatagccatcattctaggctctcaagggatttatcagtgaacaaagacaaacagtctttgctgtcatggagcttacattctaatgggggaaaagagtaaacataaaaaatatatgtagtatgtcagatagtgattagcactatggagaaaaataaagggaaagagtactagatgtgagatgctattattttgaagagaaggtcagagcagactgactaatacggtggtagtatttgagcagagactcgaagaaggcaattaaatgagacagtaagcatctttgggaagagagttccaggcaacaaacagatttaagcttgtgagatataagatcttttactgagttgaagccaacaagtaaatactatagtgagataattatacaaaagtttgtaaatttgtcccagaacttccatatattgtttgcctcaacattggaaatgtttcaggttttgagggagaagtgtggtctattaaaaagatcactagcctgggctagctctgacattagctagatgagtataatgaaagtaagtgtcctgaccttttttagttttttcaactatacaattagggcagatggaggtgcaagatgtaagtctacaaaaatagagaagactgcatattgcctttaaagggtcaaaatttaagtccgtaaaaataagagaaaataaacttatttatgrtagagtacactagcatacaagaagtcagagataaaatctatggcagaactcaaagcccaggaaaaaaaattcctcaccaatttatccccttgatcatttgaaaaattaattttcagcaagttttaaaaacacatttttaaattttaggttgagtacagagggaaataatagacactgaggactctaaaaggggggagtgtgtgtgggagggtgagggttgaaaacttactgataggatacagtgttcactgttcaggtgatgggtacaccagaagcccagactttaccactacctgatatatccgtgcaacacaactacatatgtgcctcctgaatctataaaaataaaataaaactttacattgtgtcttctataattaatcattttttcccttaatgttggacacttaatttctgtcggtgtttgcttatattctagaagagtggtccttgctcagagttaatataaattgacctcagatgagatttgccagtaaggaacacatatctcatatagatcagaattctccattccttggtaactagacagragaaaatcatagcacgtgaagattttgtagtggtattattcattagctgcattcttaattttatcctgttagaaacatcagttttctcagggaactaaaatacttagttgataataaascttgctctcataactaatggaaatgtgtttttatgcttttcaacccccctagaggtataattgtataattatattttttattcttccttaggttcttatttcctgagctgcctgaagaaggcagcacaattcctctctctgctcctctgccaaccgaaaggaagtctttttgcactgggaagtcagattcccgatctgaatcaccagagccagggtaaatggagttgggtggggacagtgaagaaagggaatggtgactagatgatcttactcaaagagtcccagcgagaaagtgtgttctctagatctatttcctcatttctaaaatgatatggttggggccaggagggttggggccagccacagtggctcacacctgtaatcccacactttgggaggctgaggtgggaggattgcttgatcttaggagttcaagagcagcctgggcaagatagggagaccccatctctacaaaaataaaaaaaattagcagggcatggtggcacacacctacgggttcagctacgtgggaggctgagatgagaggatcacttgggcctgggaggttaaaggctgcagtgagctgtgactgcaccattgcgctccagcctgggtgacaaagtgagacctgtctcaaaaaaaaaaaaaatttagctgggtaggtgccccctctgaggtccctcttagttctctcaagtactattagccataccccaggaaaaagcaaccacagatgatctgagcacaaaggctgcttagcaaaggaagtaacatcacactgtcctagaataacctcagagaaatcagcctcaaaatggaaacaatgtaggttttcagtgagatttttaattcatgaaaagaattcacagtttcctctaagacaaaattatagataatgtcctcatatcaactccatatgtaaagagcagagtaatattataasttctttaaaacttcccatctctacttttgactttttgaaactgaagctctaccttggattctgtattcaattttaatatgaaaaatgctccttttctcccactccattattttgtagttatgtagtaacgagttctggattattgcttcctgtgctgctacctcggctctacccaccgctgtttatgctttatgctttggataatgatcgcgaggaagacatttactgggaatgtgtccttcgactaaataagcagccagatattgctctcctgggctttcttggggtgcagaggtaagtrtagtagttacaagcgcaaccaaatggttttaatttaaaatgcaaactgcattattggaaatttggcactttgatatctaattatatatatggcttgtaattattttttgcatatgtcttctttaacaaaatagtgatagttaataatctttatttctgagaatatttggagatgagtatgaaacctgctgattctttggaatgtgttttttattatgttttcatatatatagtaatatatatttattatatattagtaatgtattttatatattatgtatagttatatatatatatatatataaagtgtgagctattttgcctggtattttatagctctttagagcagaatacatatctttggcattcttccttctcttcttttctctcctccctctccatttgcaatttttaagttaaaggttttgaagtgtttttttttttttctttttttgaaagagagtttcactctgtcatgcaggcaggagtgcratggtgcaatctcagctcactgcaacctccacctcccaagttcaagcaattctcatgccccaccctcccaagtagctgggattacaggcgcacggcaccatgctcagctaatttttgtatttttagtatagatggagttttgccatgttggccaggctggtctcgaactctttgcctcaagtgatctgctcgcctcggcctcccaacgtgctgggattacaggtgtgagccactgtgcccagccctgctgtttttattagaaggtattattgcttgctatccagggaatactaaattattatgttttctttctagggcagtgataaagctgattccacctccccaatctctatttgtgctaccaggaaaagtgaataagcctcaatttttttttttttttgagacggagtcttgctttgttgccctggctggagtgcagtggcacmatcttggctagctgcaacctccacctcccaggttcaagtgattctcgtgcctcagcctcccagctagctgggattacaggcctgtgtcaacgcacccagctaatttttatattttcttatttttgtgctttttttttattttgtgctttaattgttttcagtggaataattcagtagtagaaatgagataaaactgagtgaaggaaaaatatttggtaatatctgtaacgtgtaggttattgggatatagaatgacaaatcccttagggagatgataaaaactcttaaatcacttctggaatgtttataaaaacttaacctattgtggagcagttctttttaatggggacaaggaagccaatatagctgtcaactatttttatgggattttgtctaccataagtaacaacttatattaataatttatggattccattataggaaattttggccagcaaccttgtcaatccttggagagagtaaaaaggtatagtagattttcttttcctcagcaaatatgcttttctctaatgggaaggatttgagatagcaaaactttttcattttactttgatagaacagtacccaagcttgtgtttgcatctgttattaccaaagacctgcactctgacawcagtatcatttatttctgttgttgcagaraatagttttcctccttgaccttcactctcttttttgcaggttttgccaaccacgaaagatgcttgttttgcctcagcagtagaatgtctgcagcagatcaggtaatctctgatttgttgaaaagccatacaaatcaaagtagtgcttggtctattaagatattattaatatgatcttatctttacctaagccttaagcatccccattctatatgctgatggtgtcaaactcaatctggaaatcagaaatcagaatgagacccttgggttatcttttactctaaaatgaccttgcattttcaaaagtaggagagagccaagccagaaatttatccatataatcacatctttagccaattggaaattaaccaaatttctcattcagaaaagagcatatattaggagaatgagatttcacgtgggtaaaaggaaacaatatatgaatcgtagacagttggaggctacttttctcatagcaccatgggagtacaaagtcatcctttccaacgactcataatgcctaagtgtccgggttaaggcatgtgaatcccaggagggaatattgtcaaaaaagcacgatcaaatggctttattaagaaaattataggatgtctttttgtcattgtttctgtaacagcacaacatttaccccatcagacaaacttaaggtcatccagcagacttttgaggagatctctcagagtgtcctggcrtcactccacgaagacttcttgtggtccatggatgacttgtttcctgttttcttatatgtggtgctacgggccaggtaactgttttatgactttgttattagtgagtcgttatttttaaaagtctgctgcttgcattttctgaactgacagcaggagtacgctcttccactagaaaaaaatcgattaacccattccactgtgacattacccttttattgagctgttctttctttttcccatcaactagattcaaaaggagaatggacatgtaagtgaaaataactcagcatctttttctctctggggcaggattaggaatttaggctctgaggtacacctcattgaggatctaatggacccctatcttcagcatggggaacagggtataatgttcaccaccttgaaggtgagtatagttattatttaatactttcttatcttcatatctgtctttcatttaccatattataaatgccattaaccactttttttgtataaaagtttaatgcaaaccttaaatgcctttagagcacattttgttctacactttaaaacattatatagtatattaaagtaggataagccagttgttcctcaaaatactaaagcaaattcttcattatctaatcctccttgtaaattgatcaaactgttataaatgtttacatttatataaataattgtaactctaaaaaagaaacagaaaggattcttagtgtccaagaaagtttccaacaggagtgctattcaatggaacagggtaaaacacagaaggcagtatgtaaataatgaatttgaattccatcttctttctttgccttgtatttactgtaaccaatagattacaaatgagcttctttgatctgggtggcctggagagattgttagaagtcatttgtttcctgccttgatttttcttggaatttggaagaawcactctaaagtttattgaaaaaacagcagatagaaagtgcaaaaacacttgtgaaaaatgagaaagaatagacctactcttccagttagtaaaatttataaaattacaataatgaagataaaatagtatgtgactgtcacaggaatacacaattacctaaatagaaaggatagctcccatataaacacatcataataaaaacttcacatgaaagtggaaacaccaaaccaaaatggaaaagaggaattatttaacaaatggtaaaacaaagtattggatagcttattagcagttttggagggagggtagaatagcaaattatatagatgctttggggtttaaatatagagaaaggaagagagaaggaaagacaggtaaattaaaataagaaaaataaytagaattcaatgtcaggtttctggcctaggttaactatttaaacttttcaactaaaataccattaatgcttcttttttttgagacagagtctcactctgtcgcccaggctggagtgcagtggtgcaatctcgactcactgcaacctccacttcccaggttcaagtgattctgctgcctcagcctcccaagtagttgggattacaagtgcctgccaccacacctggctaatttttgtatttttattagagatggggtttcaccaggttggccaggctggtcacgaactcctgacctcagatgatccacccgccttggcctcccaaaacgctgggattacaggcgtgagccactgcaccyggcctaccattaacacttctattaaataaactgaaaagggggagaaactggggaaaatattggccacagatgacttagattattagtgtttatgttatttgaagagtatctctaaacagatcaccaaagaagaaactgaactagtaagtttacatatagaaaaatactcaacctcactgaaaatcgtagtactgcagatttaaataaggtaccattttgtgctgttaaattatcatgaatattttaaaattactgatggggttatagtgaagtcattattattcccacattgctgataatggggtaagtagccattacccttttggaaagcaattgttactaacatagatatcaacaacatcaaaaaatgtggagtttgactcaatggttctactcctggggatttatcctaagaaactaaagaatggaaaatgttacatgttatctggatgtgttattcattggggtatgagtaattcccatacctggaaactcataattcagggtgcttcttaaaaatgcattcttggaagttatgactccccaggtctgcaatgatgcttaatctgtatatttattaatcatactaggtgattctaattagagttgtaccttttaatgattggtatactctaaatgtccaatcagtaatggcaaattgtggtgtctctgcatgtgaagaatattagctagcttgtaaaaaaactttgttttagaataagacgggaaatgaaaaaattttgtctatactaattacaagtaggcaaaagacagccactagataggggaactagaarggaacagggaaaagtgaaatcaattaaatctgttgggccatcagctgaatttgttcataagggattttgtttctttagtcccatatgcattgctctctttatgtaatttctttaaaagtgaatttgaaattattttgaacttttcttccaggcatgttactaccagattcagcgtgagaagcttaactaggctgcataacagcttgaaaactggattatctactacagagtgttataacaccatctggagtcttcctgtagtggcaaaaaagaacagtgttgaaattggaaaggactttgtgttatttaggttgttagaatgagccttaccaataataagagccctgagcccagaaaaaaggactgtatagtttaaagggaggattgaaagggaggtaaaaaatcagattagaccagttcttggcctatgataagttccaaaaataccatttatctactatttgaaaaaagaagaggatatcccttcctacagtaaagggtatgtcagctacatgaagttgtaagaaaagcttccagtagagcttcttatattaaagaagttgatggatatttttgaatttctggtttgcctgaatccacctgcagttaccccgatccgtttgcaagaaccagatcgtacttgaaactatagtggccacactctgccttcctgagtcccttccagtcatgtgtgcatcatgtctctttgccaagggaggggagaaaggaacttttaaactgcagttttaactttttctaagctgtttcttgatgggagaggttctgtgcaaaactaccacattctgtccccaaaatgtggaatgcatccaaataggagtcttctgcctcttaacttaaaagaacataggaattttgtttttggtttctttatcatgctacagagagtgaatacactggaattcagacaccgactctgagctgctaggaacctcatttgtccatgtgcaaacgctgtattccaaggcctgtgaatggcagcctgaggaagttttgcatgcaggctgtgttttcgagcaggactaacaactgggaaataagcaaaaaactgcatcgatccccagcctggtgttgttcttccctatacttcacactgaactcaggatgggaagaaaaaggaaacaagctttggctttttccatctcaaaagtattgtggcacctcaacatttcagtrttttgctttttaaaaaatgccctattgtaagttgttggtttatactgtataagtaacactagtagctgttttgaataacataggtgctcttcctcatctcatctcctacaccgtggtgagcatacagagtgtcctgatttgtgttaagtgactgagaagatgttaattacttttgaaaaaggatcatggtttttgctctactttataatcaagacaagtgtttattaaaatactgttttggaatgttggctgtaatgtaacagcaattttcataataaaaggcattcatctttatgtggttgttttatgattgtagaagaaatgaacagggcagcctaaaagatgaaaggaaacccagacttagtatttctttagcccacattgtaatccatgcctctaagtattggcctcaaaagtccctctggggttttagaaatctctgtctttaaaataaacgtaaaccaatagttatagcaccctttctagcaaagagcaaattaactttctgaccccaataacccaaggacacgggtctccaaagaaatctattatttctttgaataaaaagcatattttgatagttactcgttattttttttcctcctaaacagatcgagggaagggaaggtgaggctttaaaattctgcttagaaacgttagatattaattatctcccagttgtaatgttttctcaagaggcctttccatcttgttgctgcctctaccagaatgtgcctgtcctctgttggaaggggaccaacccttaaaaatccgtttatgttaaatactttgcatttacattggagattgttttgagtttctgaacaaacacataaataaccacatttgcctggtaaagccaaatttacagaatttctgactctgggcgggggtggataatatgtggaaatggacaaacaaaaactttgagacaaattgacccattgagaagatttccaatgatgataggctgtctctgttctaagaaaagccatgttacaattcgtccttttactggagtcttgaatgaaactgttcagttactttggattcttcctactatatgcttttcagatagcatattaaagttataaattttgaagtgtattggaagaaaaaccctaaatctccaggccaatgtttgtaaatagaagtccttggcactcctgcagcagtttacaatggtcattcacatgcgtaatgaatgcttacagcagcccaaggatgcaggtgttatccccatttccccccatttttcagacaagcagtgaccaagatttgctcactgccagagctgggactccagcctagaacttccctactccctacttccctagaagtccagtgctttttgctactacagctgccagagatgtcatttcatagctggttatgtattgaaagttcttaaaagtgagttaaaaatgaaaatcttattgaaatcaagtgcttttcacaaaatatgctgtactcaaaacacaaatgtatcacattcccaacttgtgttttcatctatgatggagagataaggaaagccatgtgattaatatgggtagaagggctgaggaccctctgataattgccatttggtctctaccttttgccttgctgtcagcaataccttcctctcctttctgcaatatccccttccaaatgctctccccactgagcactccctgcagtattaagttttcagataaagaagtagctcctatctgagacagaaagcactatttgttaggttcagaacagtggcttgggaggggattgaccagaaggtactgtttttgatgggtttctattattagctgaacagtcttcagttgttttctcaccataacatgagagatttaataaggttagtaggttattggcttatttccggtcctgccacatttttttctttcattaaaaatgctatcttctgttgtggaatgtctgtcatcttgaactaatcaacaaaaatactatgtttttctgccgttaactatgtgttggcaatttgagagaaaatactagaatgtaggtttgaaaatgatacaaattagacttcaaggaatacttaagaagatttgtggcaggaaaggcttgtgagtaatttagttgttaggctgggttaggcatctgtggattacatcaaagaggatgtgcagagattttatcgggagcagtgaggtgactttggcagctaacaggccactagtatcctactaaagcttttgtctggataggagcaacatgcatgtttacagtcttgcaggtaagagaccttggcaaataatcctcagttaccagaagatgtatccataactgcctagcttgcctgtcagtttttaatagctaaagatataaatctgggtaatctaactcaaatggcttagtttcattttaactcaaatgatatggggaattttatgatcttgaaagagcaggttttgcttcgagaagccatttcttcagtatggaataatgagttgtcaggaagattgagtacaatgggcatttgccctggtcctaatcaacagcatttggacccagaggaagccagctatttttgtaagggccatttctcatcattaagtttccaagtgcttttttagggtttgtctagtaaaaagcactattttgaaaaacaagcatagtaagggtagggggttgtggcatttaatagtacgttttaaaaagctaatggaaatactgacttttaaaacaagatttaggacaaattccttaggcatcagtcacactaatgcatcttctgagtcaagaactggctatcctttctgtgtactcagtccggaattgcatgtggtgggtgcttacttatttgcagtctcaatcaagaattctcactctcaagatagcagaaatagataagcttcaactgacaaatttggtacagaagtcatggaaaggaaggtaagtcttttgccaggcatcatgccaggcatcagcatctttcaggactaaggaaacaaaagaggaaaactcgattttactacatgttaactctactgaatacctccttgaatgtcagattccttatctgtaaaacaaaggttttgcatttgattatctctaagatccgcttctgcccccagttttaaagtttgatagggaaagaggtttaagtcaggataccaggccagggaggaaaggaagggagggcacaggcctctggagttcagctgcctcccccattaggattgaagtcccagctgctggctactgccttgagggaggtatcagccttttacttctggatcttggcctctccttgttctaccccttcccaacaacaactgaacataccaagtgcttgctatggcccaagcactgttgcaggtgaagctgcagcatgaacaagataagcaacatctctgctccccaggccctctgcagacatgacacctgcgggagacagacactgagcaagccagtggatacaagaactgggaaaatgagaagtgctatgagggcaagaagttgcaactgttttcttagctacctggagggagggaaaatcattttctggaagtttttttctttgagttttgtcttagctttggctgtcataacaaagtaccatagacagtggcttaaacaacagaaatgtattttctcatacagttctggaggctggaagttgaagattgggatgccagcatggttgggttcttgcgagggttctcttcctggctttcagatggccgcgttttcactgtgccatcatctggcagggagagagagaacacatgaactctgatggctcttacccagacgctaatgacatcttgaggcctctacctcatgaccttaacccagttacctcccaaaggccccatcttcaaatgccatcaacaatggggattagggcttcaacatctgaattgggggtggggacacaacattcagtccaccataaatttgtcataggaacctgaagatgaggagccaagcacagtttttagaatttgcataagttgtagattactgtaattactgtttttgcctctatggctgagaaactttgggtcaaaacgagccttttagaatgtatgaattagttatctaggtagccctgaagttggctctagatttattagaagctattttaaccattgcattcactcaagaaaccaccgcctatctgtgaagcacagtctatctgtaaagctccctcacaataaattcatctcagaaatatgtagtctctagtgtgtgcccccaactgctgaatgggtaggcctagctcagcacagtcattcgggcattaaatatggcagaaatgtggtccacctcatgacgtgcaaacaacagttggcttgtttaatctgcactgctttgccaaggacgtgtgatttgtgaggtgctggaggggaaccaattttaagagtcagcctgagtgtcagcctcatctgtctgctctgacttttgtctgctctctagcaggcactccatctcccttttcaattttctaccctggaagtgctcccctccagggaggaagatgagtcagatatgcagctgtgatgctaaatgattcaatagagtcaaaaacaacacagaacacagraaaacgcattgtttaatctgactcaattacaagtgggcaaggtaggtgatggagggcaagtcaaaagcataacgatgtcaagctttggtagaacctagcaaaccggaagacttcagggtgtttggaaaggaatgtgtaggggaragttgtctaaaatgctgtaacagctttctgtgttgctcttctcactgccttagaatttagagtcaaaataataatgatcttttcttcttttagatagccttcctggcttcaacccacaatcagtctagattctagacagtggttctcaaccctatcagagtcaatactccagtctttaacaactaatttgaagtgttccttttataacaaaaaccttaatgtattctttattgtcctactataacaatgttgttggtccctacccccaccgcataccccttggttgttaccattttggtgcactctgagcccactccagctgctagcccctccacttcctatccgaaggtatacatgttgcatgctggaagagtcagaaataatgctctctgggaagagctcttaacctgttggctctaacaggggccaagagagtgagggtatttatataccaaggttgccattggtgtataaaaaccctcatgttgccattggtgtgtaagtactctcactcccctggcccctgttcccccgtgggattaagctctagttgcctacagtggttacttcttgataacaacctattactggctttttcaccttccctgcctcaataccctactccccattgtatattaaaccagtgcaaaagtgtcttgtgtttatatgtaaagaaaagttggcgtctagattcagataactacaggttttattgtttttcagtgacatgatagttcagtgggacatttgaaagttatacagggcatgaggcgattcttcactgtgtagggcaacttgtggaaaactttgcttaaagagcagtaggcatattttctttgcccgtgttttcttaatcccttcctcccctaccctgttggccgaaatgtagacgtgatgactggagctgcagctgccatcttggagcaggtagacagaaccatgctacaccctagggtgacagagcagtagccggaaggaacctattccctgaggacttcrtggagcaaggctgccctattagccctggattctctctgtctctgaactttcacacgaacaagatataaactactctgctaagccaaaattattctgggtttctacttcttgaaactaaatctacctaaagcaataccaaaaataaacattaaaataagcatttcaaactagttttcaaagactggtattaaatctgatagggttaagaaaactgtctaggccaggtgcgatggctcacacctattatcccagtgcttagagaagccaaggtgggaagattgcccagaagttggagaccagcctgggcaacatagtgagaccccatctctacaagaagttaaaaattagccgagtgtggtggcacatgcctatggtcccagatactcaagaggctgaggtagcaggatgatttgaacctaagaggtcgagggtgcatgatcatgagccatgatcatgccaccacacttcagcctaagcaacagagtgagaccctgtctcaaaaaaaaaaaaaaaaaaaaaaaaagggaaaaagaaaactgtccagactctatacaaattgtaggattgagccaggaa

SEQ ID NO: 93635 - DNA, 82472 bp, Homo sapiens
acagcacatagcacagttggtgcactctatgcaaagtctcttctgtcaccacctcatcccattatggtgctgaagtgaccaaggtcatctttggaacccagctaacaagagctggagctgaacatacatttctttgggtctggggagatgtagttacggaattcacagggacttgcatgtatagctctagctttctccgcacaggaatgccttcaggtatatttctccaccctctctgtcaacttatctagcatcctggcaggaggttcaaggccagagatcatatttcccctctcctaaggcatcttaggagatgggcaggggaagagaaacacggagtgaaatggacatagccggtaggtttaccactgaaaatttttccaatcagcattcatttaaaatgaaaagcaatgaatttggtacccatccacatagttttgattttgaatcaaaactaacaatgtaagaaaagcccatcaatcatggtagagaaaagtccgaattttcttcctgtagaaaattatattataaaaatgtcacatgtggccttcctcctaaaaacctataaccccagtctaatcgtaagaaaaacatcagacaactcccaatagaagtatgttttacaaaacactcaccagtatgcctcaaaactgtcaaggtcctaaaaaacaaggatagtctgagaaaccgtcacagccaagaggaacctaaggaggcgtgatgagtaaatgcaatgtcatatcctggttgggatccaatgcaatgccataacctggttgggatccaatgtaatgccataacctggttgggatccaacgcaatgccatatcctggttgggatccagtgcaatgccatatcctggttgggatccagtgcaatgccatatcctggttgggatccaatgtaacgtcatatcctggttgggatccaatgcaatgccatatcctggttgatatcctgggacagaaaaaggacgctgggtaaaaacggatgaaatctgaacaatggatgggctttggttataataatgtgtcaatattggctcagtcatcatcacaaatgttaatctaagatgttaatcagtggaaattgggtggggggtttatggaacttggcaatttttctatacatcaaaaactgttttataaagtttatttaaaatgtcgcatgaagaaaacattcattagtacacagcccaaaacacaggaaaaaaacttattagagtggtaggaaaaaagaattaataaaatttttaggtgatttttttctggattttgtgaaatttatgattgcaattatgtgggcaacattttttcccttccctactgccggaggccctagaaagcccaaacttttaaaatttgtagtttactgtgatttctgttctaattctaaaggaaacattcacttttgtatccaactttgtatttgtaattttcttatagaggttccctaaactgtgtaagtttaaggctccaaacgtggatctacccttggttgacatcgagtagttagaaaaatgtgtccaactcaacaattgaatacctactctgtgtaaatgaagaggacgtgcaggggagtaagaaagactgggatggttcatgaggattcacgggacacactgcctccttccagtcccttacagtttcatgggggcatggatgtatgcctaatatagttgcagtcccaaaatggattgaacaaaaagaactcagttactgatgccaatcttcctttaaccagccaattaccgaggtctgtaattaaaagctcatcggccattattaattgatgtggctatacttcagatagccatgctcaaaagcaataggtgcagaagattaataataatcacagctttgtagttcctaatcacaagtgggaacttttgagacaaggccactgtaaacctgctaatcagcttgacccagaaagacttcgattctttttttcttttctttctttctttttttttttttgatgtggtcttgctctgttgcccatgccaaagtgcaatggtgcaatcacggttcactgcagtctcgacctcctgggttcaagagatcctcccacctcagcctcccatgtagctgggactataggctacaggtgcacaccaccatgctgggctaagttttgtattttttgtagagacaggatctcgccatgttgctcacactggtctcaaactcctgggctgaagtgatccgccgaccttggcctcccaacatgctgggattacaggcatgtgccactgcacccggcccagttctctttagcttctccaggagattgatcaatcsgtgttaggcagatgtcaatgtggatttagccagaattagccacaacattttaatcaggccaaaatgtaacaagggcaggagtgaccgaaaaaagactcaaatttccgctaggaaatttgcaccactacaatatccaattggctcttattcccttggctagagagatgcttgaaaaaaaagacagtagaaaggagggttaagactggtttcttaaagaagtaagtacaaggaagtataagttcatgctgcctgcttctaaaagaattctattcctcataactacataacattataatgctactgattcataaggagtttacattaattctattggagaggacaccaggattattagtgtttattttcatctaggatctttattctttaatgctgttggtcccacagacacatttcagtatacaaaaacactgcagtgttaatagccaaaagaaaagccattatgatgtgaatagtggtcattgtgatcactgtgacacaatttttaaaaactttttcttagagacggagggtctcactatgttgctcaggctggtcttgaattcccggactcaagcaatcctcctgcatttgcctcccaaagtgctgggattacaggtgtgagccaccgcacctggcccaatttttaaaaacaatcatgtccttcatttaaaaaaaaaaaaaaaaaaaaggccaggcgcagtggctcatgcctgtaatcccagcactttgggaggccaaggcgggtggatcacgaagtcaggagatcgagaccatcctggctaacacaatgaaaccccatctctactaaaaatacaaaaaactagccgggtgtggtggtgggtgcctgtggtcccagctacttgggaggctgaggcaggaaaatggcatgaacccaggaggtagagattgcagtgagccgagatcgcaccactgcaccccagcctgggcaacagagtgagactccgtctcaaaaaaagagactggtttcttacctaagtcacaaactcccaactatagagtctggaatcttcatttaatgagaacgccaagggcgtggctgtcaatcctatgacacctgtctgaggtaggtattattcctgatttaaggaggatgcaatgaggcttgatgtggattcacccaccccaaagcctgtgttcttaaccactatgcaatactgcctcccatcaaagtctctatctcaagtccacaagacaaccccatacattgtaaaactttttggagtgattagataaaaacttttttgtttttttttaagtgtgtgtgctgaaagagacctaagagattatttagccaagcccccttatagcctgaggagaaatctaggttctaaggaatgaagttgcttcccaatgtcacctagaagttcctgccagaaggagtgtgaactcaggtctgatactgggttgtgtgcctttcccagccttgagttggaaatcacctcattaagggctagagcccagggagaggcacccagtttaaaagaaaagtgtcttgaggagaagacgtaaggtgagacagccagtgacgaccatccacatgttacgggttgaattgtcacccccacattccccaagttcatatgttcaggggtttgttgttgttgttgttgttgttttgagacagagtcttgctctgtctcccaggctggaatgcagtggcgtgatcttggctcattgcaacctccacctccctgggttcaaacaattcttctgcctcagcctcccgagtagctgggactacaggtacgcaccaccatgccccgctaatttttttatttttagtagagacagggtttcaccatgttggccaggctggtcttgaactcctgacctcagttgatctgcctgcctcggcctcccaaagtgctgggattacaggcatgaaccaccgtgcctgggcattcaggtatcttagaatgggaccttacttggacattacctcatgattacagaggtcatcaagttaaaatgaggcaattcgggtgggccctagtccagtatgactggtgtccttatagaaagaagggatttgcacacacacaccacagggaagatggtgtgaggagacatagggagaagatgggcatctgcaagtcagagtggccgggcacacatgctctttcatgggcctcggaagcagccagccctcccacgccgtgattttgtacttctagtctccagaaccaggacagaccatacrtttcggttgttgaagccacttagtgtgtggtacttcgttccagcagcccttgaaaacaatagaccacagaacttgggaggtgcctgcagaggttctggggctgagggaccggttggagaagaggaaaaaggagaggcaaagatgacaaaatcacggatggggaggcgagatctggacagaaaaaccagggattagccaagcgggaaccagtgaaaacgaacgtggagtccattttttctagatctggaagatggagatctaaaaggactgagctgctagagaggttgctggtgtgtgcgttgtcctcaccccactgcaccactgcgcccagcacactgtgggagacacccagggaaagtccttcagttatttgtgggagtgaactgcagtgtggctgaggcctggagcgaaccacggtcagtttcccctgcctgcagcccaggcatagccctgcgttggttgtgcccacactctgggggcagcctgagtgccaagtgtggtactgctctcactagcatttaacctctgtgccccagcttcctcttctgtgaaaggacagtaatgacagtacctacctcactgggttatgaagattaaatagaataatgtgtacgcagtgtttgtagcaatgcctggcatcaagcactgggtaaacagtatctattattatcaaaggcctttacgacaacaatcattcttcaaacggccctccagcgaacgctgggcgcaaactccacggtaacggggaccaatgttgttagaggttgaggttcctggtaggtcccaggtgctaaaaggaagagcagcctttgggatgtgagcccgaaaaccatcgtgttggcttctgaagccccaagatgggcatggcagggacgcggaagccctcagaaccgcggaagccctcagaaccgcacagcaggtggccgccgtggtgcagcgcgcagtcggccctcagctcccctgcaccggcgcgagctgcgggcgctgcccacgtcaggctctgcagacaccagacagaaaaggtcttccggccagggagcgtgggggaaaccctgtggggccgcgcccgtcagtgtcaaggaaaaacggagaggaaggcccttgcctccagggccctcgcagcagaattctgcccggcctgccaggaggccagcggggcacgggctgagggtgcaggatccggagggcgccgcccgcccctcgggcatcgcggggcccagggtccgcggggcctctgagctgaggcggtccaatgtaccctttgtccttcctcagattcattatgaaatccgaggcagtctgggcgactccagcggcgttcgcccgccgcagcctctcgaccgccggccacccgccagccacgcgcgcccagacaggagggcggccgggcgctcggcggggcggggcctgccgggggcggggcctgcgggcggggcggggcgcgggagggcggggccggcgcggcgagcgcaccagcagcatcctggctcagccgcggcggtggcgggggcgcaaccagcgggccgaggcggcggcgccagcggctctttaaatagcatccagagccggcgcggggcagggagtgggctgcagtgacagccggcggcggagcggccggtccacggaggaggtgagtgcgcccgccgtgcggagccgcgcctgctcccgcggcggtgcccgggccccggccgaggcgccggctgacgttgcccttcagggccgagcccggagcagcggccgccgcggaggcgcgtgagccaccccaggctcgtggggccgcgccgcctttccggcctcctgcccgcggccccgcttccctcggcagccggaggcctccggggtgcccgtgctgccgcagcttcctgtgtctgagtcgcgggcggcgcgggcgcggggctggtgcgcggccggggatgcgcgcgggaccgacccttgtgtgtgcggcggcggggaccggcccggcgaagcagccggaggccgcgcttcggctgggaggaggtggcccagctgggccgctgacgttgccctcgtccgcggcccccgcctgcccagaggccgggctcgcgggcgttcggaccgcgcgtggggcgagactgcactcgcgcccgctgagatgccggccccacgcagcgcggcggcacgaggcccacaggcagctcagaggccgctgccagaggcagacattctctcggtgactccagaggagtgcccgtggcccttgcacttggccgtggagtcattgatctaaggagtgctggcattttttgaaattgagaagcaaagatgatgtctgtcacctggcagcgtagacggagagtggcggtagatgacttgaatggacacgtggattcgagtctggggacaggcgttcccccagtcggtgcgttgtgagagtgtggaaaccccttccccactcagtccaatttcaaggttatggagcataattaagagtgaccattctaaaagcgttctctagtgccctggctaagacttttaagcttcttggtgcaggagtgtctaaagtcccgcgactctcactgccctgtcttttattttcttgacctttgattagcgttgagagaaactggttaaatcttgcagtttctgccacmcatttcacaacttaacctgtgattgtcccaaagaaaacaattattggcttcttgctagcaaaaaaatcaaaggcttccggttgattgtttctttcttttttttcttttttcaagtggacgtggaaggttaggctggctaaaacttaaagtttgagttgtaggtctgtgctgggtaggcttgagaagatggagctttttaaggaaccattgctcgccatcagattggagccagacagtgcagtgtgatatagtggaaaaggaccaggtcttgggagacttactttcttgttctgactcaactcggaaaacacctccctagtctgaggcccccctccttatatttgtgaacaaactgcattagactaaaatctttcacgagtccaaattctgcgactagaaaaataaacttgttagccgcacaccttatacctctcccctttaaaacagacatattaaagacttctgttttctgaatttactgtaaacagaatacttaaaaaaaaattacccagacaggcgtggtggctcactgtaatcccagcactttgggagaccgaggcgggcagatcatttgaggtcaggagttcgagaccagcctgaccaacatggagaaaccctatctctactaaaaatacaaataattagccaggcgtggtggcatgcatctctagtcccagctactcgagaggctgagccaggagaatcgcttgaactcaggaggcagaagttgtgatgagctgagatcccgccactgcactccagactgggcaacagagcaggactctgtaaaaaacaaaacaaaacaaaaaattacccttccccacaattataagcattttggcatatttccttcctgtctctgttgttcctattttggcagtatttttattgttatcgcaggcagcctgactgaaaagaaatctgggcttctaagtttttggtatttaggaggtagatacaagtgacccatgcatgtagggttaggtatctatttataccatgcaggtagagttttcatagccacctctacttttgggtgaagtttaggctaactgaaartgtaccagcatgcatggtgtatgcagaaaaatgaacgtaattcagattatgtgatagttttctcttgttgccattatatataacccagggcttaccacaaactgaaatttcttatgcattgacatttagcatttgatgtaaaatgactatctcagagttgctgccacaaacactggtaaaactgtccctactttctagcatgcttaatrtctaggtcttgctacatcttttttgatgtaactgttttgtggaaaatggttgtgtgtttggggaggcttttgagaaaagataaggttgtcttgtcattataactgggtatttctcctctctcccttccagtttcacttgtctggaaatagcaagactataggagtagtaatttctagatatttatagtcagtaaccttagaggaatgtttagtttttaagatcaattgaatttattgtgtaagtttgccatttaaaacaggtgcccatttgtgtttactgtctcttgtaaccaaactctgttcaattagaatccattagtaatgttttgtggagagtcttgtttggatgatgcagtgcatgaggctcctgtactacaaaatagaaaagaagttcctctaaggcagctcaaagctgttgatatcctgaagcctttttaggcctccctctctgacaggcggtgatctgacaggaggtagataaaggtgccggagtttttagtgaaggttggcagtccaacttggtagtcagacaaacacatgatggtcaaaagtgcctttgacactggggcctggagaagaattctcagtggccagagctgatctgaagctgcaggcagttgagtttgagtttcaacatgttggtacttcaaggggcttctgaaaagttttaaaggagcacaagccctgaaggagtagctgaacttagtgaactggagaaggcaggggcagttttaccagggtttgtggcagcgactctaagattgtcattttacatcaaatgctgaatgtcaatgcataagaaatttcagtttgtggcaagccttgggttgtatataatggcaagaagagaaaactatcacataatctgagttatgttcattttctacatcatgacattttcactttcttttttttttcttttttcccagataaggtctcactctgtcgcccaggttggagtacaggcatgatcatggctcgttgcagcctctccacctccctgggctcagttgatcctcccacttcagcctctccagtagcttagactacaggcgcacatcactatgcccagctaatttttgtatttttttcgtagtgaagcggttttgccatattgcccagttgtctcgaactcctgggctcaagcgatttgccctccttggcctccccaaagtgctaggattacaggcgtgagccactgcacccagcccactttcatgttcttgactgtgttagaaacaacacagtattgattcacttatgacctttgaggaatcaagaggggcgggtgaaatattggagactccttgaagtgtggctggcttggagggtgtcacccttggacaaaaacttaagtggaggtgagtaagggccctgctcccctgtgctgcctgccttagaaggatgtgatcatctggaggcaaatagcttgttgcttgaggccaggagttcaagaccagcctgggcaacasagcaagaccccatctctagaaaaaaaaaagtaaaaacaataaaataaaatctcaaaactggtggttccatataggtgcctgggctgattctctttatgaattatttgctggtcttcaagtttaaataaaattctgaaagctgtctaatatctaaaaaccacttgccacagaaaagctgtatttgtttttcatattttaagagtcatacatacttactggagaaaatttgggaaataggaaaaatgaagctcttccagagattaaatactattaacattttgttatatttccttccagtcttttttccctatacaataaacaaattttaagcatacattgttaattaaagattacaattttgacaatttaactttatcacctaagttatattgtgggcttttttacacgttgttacatattcttcaaaaaataagttctgaagatgactgcattatttgctgtatgggccataatttagttacttctccccatttgttggatatttttcagaacagtttaccaacctttgttatatgtttaaatacgtctttaaaaaataaaaaatgttctgctttaaaactcttgaaattaacaataatttgaaaagtgtttttactaatgaataggtttaatggacttttgggttcatgtattctagtcaaaagcagttgaaatagggatttcatggtttggaaagagaaatggaaagaagttagggcatcagaggaggaaacggggcctgcctgtagaccatttcctcattctggaggggacttctgataaatgtaggctctatccattagcacagctttggctgctatagaaatgggcactttccccttaggtttgttgtgggagaaatgtccatataagaaggactgaaacactctgaatactatttattcctttattaagcagagtcatgagaaagtgcttccggagctagtttctccttcagggtccaggtgtctgccacaaagcagggctgtggtagctgaccgaggtggtagccacagcctggacacggccaggcttaggaacagagcagtgatgagagcagcagacagagccaggtgctgctaagcttctgatgggttaactcattagtaccttcagcaaccctgtaaggtaggtcctgctgctatccttactgtacacaagataaaggaacaggtgcaaagattaagttccccataccagaatttgaacctaggcagtctggcttcagggtctgtgctcctaattgctgggctctactgcccctccagagctagaagttctcactccaggagggcctagaaagttccaggttaggccaggtgcggtggctcacgcctgtaatcccagcattttgggaggccgaggcgggtggatcaccctgaccaatatggtgaaaccccgtctctactaaaaatacaaaaattaactgggcgtggtggtacgtgcctgtagtctcagctgctcgggaggttgaggcaggagaatcgcatgaacccaggaggcggaggctgcagtgagccaagattgcgccacagcactccagcctgggtgacagagtgagactctgtctccaaaagaaaaaaaaagaaagttccaggttatacagctggcagtaagacaggaaggacagagctgggtctccttcggtgtcactgctccttgattttacccccatctcatttacactctgccttgaattatctctttataccactagagtgctgaaagagaccacaaattttgattcagcgtggctcagggagtgataagatcacttgctatgtagctgtgactttctagagaattaaaaaataaaaggctttgcctgccctggacattggtcttgtaaggctggagaacaattgagacgcatgactggccgggtgcagtggctcacgcctgtaatcccagcactttgggaggccgaggtgggcggatcatgaggtcaggagatcaagaccatcctggctaacacggtgcaaccctgtctctactaaaaatacaaaaaattagccaggcatggtggtgggcacctgtagtcccagctacttgggagtctgcagggatcggaggggggtgacttggccaaggtaacacaacctgcctgaccctctggccatgcacacgtgtggagtttgttcccgggccctgtgcctgttcaaagaatggctggacgtcggtattgcccttggtttctgccctgaagtccagtcagtcagcagttctgcttattctgaccctctctgtgcagtattacccaacacacatgcatttcctccttgccttctcagtattgccatcgtgaaccagaattgtcacctccaatttaaacagtgaaggcctttgttaggaagaggggcagggtgcagagggggatggttgctttttctaaatcacagctctgatcaaatccctcctaagcagaagccttccaggctcccctccataaggctccaggtgtttacttaccttgcctgtcaggggcttctgcagcttgcttcctacctgctatctccactcctctccaaaccaccatatcctgaggcttctagaaagcaaactctggcggcatggggttaatgggtctgtgtacccaagacactgtacctgggtgctgtcatctgcctgactgaccttcctgtgtcctggtccgatggtgtctttgatcctatagctaagatcaagacactgaaaatctctagactcaagtctgtgcttttgctgggataaagtttgtgttgagtacatctaggctgggtgtggtagctcacgcctgtaatctcagcactttgggaggccaaggcaggtggatcatctgaggtcaggagttcgagaccagcctggacaacatggtgaaaccctgtctctgctaaaaatacaaaaattagccaggtgtggtggcaggcgcctgtaatcccagctactcaggaggctgaggcaggagaatcccttgagcctgggaggcagaggttgcagtgagccaagatcgtgccattgcactccagcctggggtatagagtgaggctctgtctccaaaaaaaaaaaaaaaaaaagtacatctaaatggtacgatgcccatgttggcctatttggaatgccattccttgtcccacagagccctgctcctcagaggcacttttcctggagtgactctccccttcctcacctacactcactgtcattcagctgtagatgcaccagcgatcatgctagtggttaaaatatsgaaatactcccatcctggctagagaatagctgctacccaagtgcccccgcccttcatatggaaactaaagggttaatacatggggcagtagaggaactttggagccctgttttggtgcactggcctgtgtcttttctggctggttggtgtctggccgtactggctattaaatattttgatgagcatcccagcctctgtcccacgtgcatcttttcatgagtgcatatctggcttccacagattggcaccccagccacactctaagctctgggcacatgggagacctagtcattgtcatctctgtgttttcagcagcgtttaatacagggccttaccgctagtaagcatgtaagattatctaatgatggattgagggtagggcaggttccgatggtcagatgtcccatagaaggtggtccctaacaagaatatacattgtaatgttccaggtttgtctattctgatactgtgcaaaacgtagatcttatagccaagatcaaggcatcgaaagtctgtggacctaagcctgtgctttcactgagtgaagtttgtgtttcggagtacatctgaggtgtttctttccgtgtagtttcacttgtgttggagaagcaggtggctgtggtctttgcagggtgtgagaggggaggagattagtgttgagctccagctaatgttacataactctactgtagtcttcctttacctggtattcttgtgttcaaattgccccttgtttctgtgccactagtgaaatggtcaaatggctcattgttccttctgtaggacagttacctacattgcgcctcaggcaagcttctgaggcatcccaggatggggagctggcgggggaccttatctgtcaagcagcccagccaggcacctcacagtggacggaactgagttcttgagggggtggctgagcagcccagactcccaggttagactctgaagacagccagtctgtgcttttctctcctgatgtgagtcagaggcaaactctgccgatgccaagacctccctagagttcaggcagggtgaagatccttgtccttggggtcagggctgaagcttcagggtgtccaggacagaccttcagaggaggccagccctggagcctggcgtgggtctcggcctcaagcctctctgtcctgcagagaggccggctcagtctcttcaccctctcaggcaggccaggcgacggtcaccagtagcgtcctgctctctctggcatgcttcccttcatcactgggtgatgctgagtgtcttttcctccctctttgatgtgacagtccctttttgcaggcttttgcaggcactgtccctctgcctcccaggtgtggcacgcatttcagggtgcctccattagcagtttcatgcattgttgcccatggtggggaacagatggagacacaaggcaggcaagccaccaaagaggctgcagggctgctcaggagatggaaggactgtctccagagtggggtgtatgccccatagtggctgcctagaccatccattagattgtagaatagaatagaaacattagaacttctatggatagttattttttggccatcttttaaattcatatttgtgtgttttctaatggtcagaaaatacttgtatatggtttatagataaaagcatttaatgtgaggggtgcatttatttattggggtacatcatcagaagtctagagaaccagaaagttaactccttctctagcaccagtatcatgagagacctctgaatgccattttttaaaaaggaaagaatttgtcaattaaaggggaatagaaactgctctctggctaggttgtgattcatgtcaaataggcctgtgacttaaggagagtcaggttaactccagagtatgttttgtctctggtcccaaaacttagcagtgtggaagcctcattgggatcagggttttatttttttctcttttgtttactatcatatcccctgaggctggagctgacttgcatatcctcaatatttgcaaattgaatatatgggcgtttttcttgcatgataattaagtattatgctgagttggatgcttcaagtcaatattcaggttgcctccttttgtttaaacctttgggcagttggcaagatgcagcctacatgccagtcagttttactgtcctgcacatgatacccccacrcggtagaaccatagagccgtggaggcctcagaaatgtcacctgagagacagggtgttgggatgtaacttaaagtaattttttaagaagtgggtataatgaaacagcaaaaygttgatcattactgaagctgaagttggagtcacgggtacataaaatatagttttattatacttctgtgtctacttttgaatagatttgaattttcataataaattttaagtgaaacataaagggaatatagagaccccaaactagtatcacccattccgagcaggtaatggccgaactgcatagtctctttttctttctgtcttttaaacactggtcattattctataatcttctgcaacttgttaggtttgttttgattttggcttccccagagccagtcacctctttttatagttacctgagctctttgtgtaattttagctcatgtctcgtggttgtcaccagtacctctcttctccttcccaatacgatgagctaaatcctggttaaccttttccctatttcacttgttgcttcctccaacaccactgaggtcttccacatgacaggcacaattcagaggccagaacagggtcccatgttttttgcaggctgcgtccagtcctggggaacctcatagcctgtgrttatcttctagattccattcatgtctgcttttttttttttcttttggatggcgtctctgttgtccaggctggagcgcagtggtgccatcttggctcactgccgctgcgccccccacaggttcaatcgactctcctgcctcagcctccgagtagccgggactacaggtgtgtgccatcacgcctggctaatttttgtatttttagtagagatggagtttcgccatgttggccaggctgggcttgaactcctggcctcagatgatccacccacctctgcctcccaaagtgctgggtttacaggcatgaacctgtaaacctggcctcatctctgctttttaaagtaacagcaggtacctgttgaaatctgtaaaaactcaactcagaagtggatttctccaaactcgtgagaggctgatcttcttctccctgggcagagaggtctttgtgtcctgtcttctcacccgtgtcctgctaagccatttctgtggttatcagtctctgaaaccttggtctattttaagaggtgtgagtaactctacccaacctttgccctttttaaccttcttatccaggtcactgatatgtgatagctgtgacctctgcgagctgtggggtgctgtggactccttgaagacaaggactgggtcttactcttcccagtttccccccccaggcctgggtcctggaggggacaggagggctctgtgaactaaacacccactgggtgagggcgagcctcctttagccagctgtttcttactcagccaagacattgacaagaatgctgtcatgggagagagagaggcagaggctcctgacggttgccttacaatgcggctgcgagtccccagcccacctgccgctccttcagggcctcctccctgcctctttgctcacagcactgtctggctgttgctggtgtttctccacccactcctgtctctgcctgttcagacttggcctggttccaccctcagctctctggacagccctccctcggatgcctggtgcatgcgtactgttttctccctcccctagattcctggagcaccagggccctacctgccgtggttatcagatctgtcttctgtagctctgttaactcttgcaggtgtgtttgtcttcattgatatcctaaacttgctgaaggcaaagaaaaccttgtaagtattttatcctcaggctttctgattgtcaggaastaaggagagttggttatccccctggaatgttcagagtgttgcttctttttttgtggtgtgactcctttttcaaagaggcacgaaagtggaagtggctcacatagcaggtcagtggctgagccgggtccagcgtgggcagacggggcaaagcatagctacatattttccaggaggggtttatatcctatctgtcattctgttctgaggacaggtcactacctaaatccttcgtggagcaggtgggaaatacataaatacaggaggacattaactgacctgactcacttatagcttctttatctggagaaacttttaaaaatacagctaatagttaggatggcaagttttatattaatttttccatagtaaaaaattgggaaaaatacagcaacatacaaagaacaacaacatagtagtaaaaacacccatagactcgccacatagaattgaaggttttaacattgactcttttcttcatatatcactgttccctgggggttttgggtattaggtggaaacttgattgtttagtcctggacgccaggattgtgtggccatcttttcccttctcttacatagtcttggagaagctaccatgatgttcatgatggaaagaggcgtagctctcctctgttcccactctcctttttttttttttttttttttttgaggcggagtctcgctctgtcgcccaggctggagagcagtggcacgatcttggctcactgcaagctccgcctcccgggttcatgccattctcctgcctcagcctcccgagtagctgggactacaggagcccaccaccatgcatggctaatttttttgtatttttagtagagacggggtttcaccgtgtgagccaggatggtcttgatctcctgacctcgtgatccacccgcctcggcctctctaagtgctgggattacaggcgtgagccactgtgcccagccttacatgttcatattctgtttatttccatagtcaccacgggaagatgggaagatcctgactttgggcagagcacctgagaggaccccaggatctaggtaccttctctgygtgcagtttctcaaacaagtggagcttcctctccatccatggccctcggaggaggaaagtgcctgcatagcttggggccagctctggctactgtgaaaggacatttgatcctctctgctgttcagttgtgctctcttctcctggtgtggtctcttgcttcagggcttactttgtggttagctgagtccagtaaggtgaagagtcttctggattatttcagtggcaaaaagccttttatttccttctttagctttcgtaataacaggccgtgcttgtcttgcctaatacccttagaacatgctgtcatgttcttcaacttgcggtcatagagacacaattccgactcttcctgtgctgaacatcagctgaaataacatgccgtattgatccagttcatgagtgagaagtttagtctacacaagccttttctgtcttgctctttgcagaaggattgcgtcagcctaaaaagcggatctttttgtctccatccgctgccacaaagctgttgacggaggctatctgcccaagttggctgccttctctagctcttatcagtaaacttatctgcctcattgtgacatatctacaacagttgcttagccttattcaatcagtattggaagacaagtggaatcatctttcttctcataggaaattttttgaatggaaacttgccctcttaaatatgtaccgccaaaatttagccctgctgtcccacgcaaaggctgtacatgacctggatatcgtcatggggcatgtcctaactataatcatcattttctcaagtggatgtacatgacagatctttgcagctgtgtgtgaagagagaagggaggagagctatatgttttgttttgttttgttttgtttgctctggagaatgttgggcatatcctgttgtcagcattccgtacatctcaggtggccgcccactagctctgtgtttctgggagcattctcctcactagagccctcgcgtgggactctggatcttgtgcttgagtcttgtctgtttccctggtttggaagattctcttttctgtcatagaaaactcacagaagttggagtccagccctggtatggggctctgggctcaagcctttctgatatttgctgttttacttaagaaaagtacttatttgatctcttcccttcccccggggcagccttgatttgttttaaatgaatcatcagtcgtctgtccaaatctcactgtatctcagcgtcttctaaagacagtagcccttagagttgatggcagtcttgggctgacattctacataagtgaaacaatttgagaaatataaaacatgatcaaaataagagcaagagaatatttttatgtcccctttacatcagtggctcgcacccttttctttttcccccagtcagccaggagatgttctctactcctttctggtgtgcggtgtaggagtctggtggtgggtagaaggagactactgaagttggaaaatgcttaataccccctttctttttggagaatcactgttctatgaatatatcctcaagggacttgctgcagagacacagtcagaatcacagagggtctgacacggtcagaatcacagagggtcattcatgactcagtagatgtttgttaagcacctgtccttggctcgggactgtgttaagaaccaagggcatataaagacagatgggaggagaccctggccggggagaggaagaagcatctacataggtactaagtaccattcgctgtaagtgtaagacaggaggtgctaagtaccacacaggggttacaaataaagaagtcctggagttcagaggaaggactgattgcttctcatagaggggattgtgtaagatttctgggtagttgtggaaccgccgcctcctcccacatgaaggagggccctgaggaccctggaaggttgggccggttgctcacaaatcaccctcctgtctcctcctcccagtgtctcttcagtgttttgccattcattctcaggctcaaaattacttctcttttgtccatttgtatccacttaagcaatttttaaaaataattaaactttttttattgtggtaaaatatatataacataaaatttgtcatgctaatcatttttaagtatacagttacacagtggtttgaagtacattcatagggttgtataaccattaccaccatctagttccagaatgtttcgtcatcccgaattgaaactctgtgcccgttcagcaataacgctcattcctcctccccctgcccagcccccagtaacctctctgctgctttctgtctctgtgaatttgctgattctaggtacctcctagaagtgagatcatgtagtatttgtcctttgcttcatccatgtcatggcatgtatccaaatttccttctttttaaaggytggataatgttccattgtatagactacattttgatccgttcatctgttgttggaaatctgggtttgaatcctgggctcttaaagcattgtgcagctgggcgcggtggctcacacctgtaatcccagcactttgggaggccaaggcgggcagatcacaaagtcgggagatcgagaccatcctggccaacacggtgaaaccccgtctctactaaaaatacaaaaaaaaaattagccaggcgtggtggcgggtgcctgaagttccagctactccggaggctgaggyrggagaatggcgtgaacccagaaggcggagcttgcagtgagccgagatcrcaccactgcactccagcctgggcgacaaagtgagactctgtctcaaaaaacaaaacaaaaaaaaagcattgtgcatcgtggcttgtcattgtcagtgtcacctatgccctctgtttagacttgaacacccacgcacgactgggctgatgtgctcagctcttgaggtctgtgggctttggcttcagacccaggcactcatcctgttctcatgtggaactagggcaggacatttgactcctgtacagtttcctgatctttgagctgaaggcagtaacaaccccgtgcagtaaggactgtgacgaggacgcatttagccctgtgcgcagtcccgtagcacagcacctgacacacggcaagtgcttaagcacagtggctcctaacaaamtcataactaagcccatttccccaaacatcttccttcccctttcctatcctatcctatcctatccgcttgagccctatcgtttgttccagattaatgtgcgaaagtgcgagccctgaggtcaggaggcacttctagtagccttgtctctgtccctggggcatgaaggatagctcattttcccagatgattctcatttgtcaaggaccagctcagctgtgccttctccatgcaaccctccctaagagcaaatgctccctgtcagaattcattttgcacttactgctactctgttatccactattttgtgtatacatttatgttatgtcttttaattccaagcccaatataagattcctrtcccaatataagatgaaagtgtcccaaaattctccttcagccttcctagttaagtcttaccaaggctgtcatagtatgaggtgctctcagcccctgtatttggaacagcctcggggagagagggcaccttgtcctgaaacygtctctaccagtcctagtcatgggtccttgtacaggtcaactagctgaattagactttttctacagcaaatgtaatgctagctgggtaattatttcttagggtttcagcttacaaaggcaaatgttggttgttactgtaaaaagtgcatttaaaaatcagtttaaaaagctataaatagagtatgaggtttagttagataaatgtggacccataggacaaaatttctcctgttctaatatcattcaaatgtgttcttgtgacttgggagaattttttcactagtagcacatacatgacttcaaaaactgcttcaatttcaacaacttcagtggaagaggaaaatgtgaatgtatgccacagaaaaccattcgatgcctcaaaaagtggctgtagagatgccccaaaccctgtttgaagatgcatattcaaagaactcaaataacatattaatgaaatgtggtttatttgtttattttatttttattttttttgagacagagtctcgctctgtcgcccaggctggagtgcagtggcgcgatctcagcttactgcaagctccgcttcccaggttcacaccattctcctgcctcagcctcccaagtagctgggactacaggcgcctgccaccacgcctggctaattttttttttgtatttttagtagagatggagtttcaccgtgttagccaggatggtcttgatctcctgacctcgtgatctgcccgcctcggcctcccaaagtgctgggattacaggtgtgagccaccgcgcccggcctaatgaaatgtgaatttaaaacagtatttctaaagtaatttagttcttcatgtgatttaactggagatgtagtttaatgaatacagaaactgctataagatatttgaccctgcatcctaaaaatttatctgttcaaattcgacatattgtgtttgagatctctttattttggggggcatatatgatatttgtgaccaatgtgaatggttgaggtatggtcctcattttactggttaacagttcaaagctttgtgtctcactctttctctgataactttataaggggatgggcagggagtggtttaagtgtagaagtattcagctggacttgaatatttcaataagtcagattaataaaatcagggyatctgctttgtttcttctttttacatccttaggaaattcaattggtgatctataagatcactttaatgaaaattaagtgggtttaagatttattatacttaattgggaagaaaaagccacaaggcagtgggtgggaataactgactccctgtggaaccacttgcatgtttgttatgggatcccaaagttaccccaaatctttctcctgatgctcagagtgaggagatgggcccagagcagtgaccacagtcagggagatcagtgggatagggtttggacagcaacctctgctttcctctccagctgggagactggcatctcttttgagctgccgtacctccctctctctagggagagcctgactgctcttttggttcaaaagggaatggcttaagcaaatctaactttagggaatttgccaagccagggttaaggagcacgaatccaacaggtttggagtggtgctttgaaagagcagcaaatggcctggctgctgctctcttgttcctccctgaagcctgagctctgcccagctagtgaatgacaaagggggcgctttcagcctctgtaaatagcctattgtacaaggggaggaggcggggcacggaatggcagcatcttgccagcttgggttgctgcgttaaggaaagatgtcaggctttcttaatttgccactgcaggggcaagggtgtcatttatgtgggtttgtttgagggctgcattcctagtgaagtattccatcaaactgccattattcatcttgatgaaagcttgaggaactttagaaggagagaaacatccagaccacccggtttttggtttctaaatgacatgaagagaatacaatgttaatgtaagtaaaagtttgcagagttgcaggggcagtgtgtgtgtgtgtgtgtgtatgtttgtgtatgtgtatcttcaagagaatgatgtccttgtgagtcacctctggccctgagccactattttcatggtacaaataaaatggtgaagaggtgaacctttgtgtatagtgggccttgaactcaccacgtgttcagaggccagggtgatacaataaatgctaacgtttttgtaagacattgagcatttaggtggacctcaggagggagctgtcataatacctgggagtgtgagtactggaaggactttagaaacctgacctcatggttcctaacctgggttgggctaaaggagacttgtgatagttatgtgtgttctcaggggagagggtcagtggcttagcatagttaagaattattagcataggttggatttagagtcacattggttggtgtcccgttcttgactaacatcctggggaaggcttataagtctctggccttggtttcttcctcatcagtttgcttttgtgatgttcagataagacactggatatgaaagcctttccaaaacactaagtaaatgctaattgcatttttagttctatccaragtttgggtagacgggtaccaggatttyggtttctgacagtccgtgcagttcagtttccatcaccctgcctcgctatgcctgtctctgcccaggtctatttaaaggaatctcctgtgctggatctttacactgggcttgtgcccagatttccttggccattgttaccttccccatccttctgtggttttagactccaggtttacagaaaacccagctgagcaaacccactttctgtaagagtggggaggagggtgcacaggagtggctgtagaggaaggagaagctggctgtcagtagccttatgtgttcccagctgggaaatactggctccttaagcctttaagccaattgaattatatttttggcaaacagcggcatgatttacatgcccaggctataaatttccttagatgtttatatggaaatttgattttgaaagaataaagaaatattcaaaccagaacactactggaataagaatacaatctgtctgagttttaccatttgttagcaagtgtatgagtcttagtccttcttagagaccccttagtctaatgcttatgttcacatacagcgttgaaagactatttcttgtgcctgattttctttggatgtaggtgtacctccatttttaaataccccaagtgccttttccttaatagcagttaatagaagggaaaagatttataatgctatcagtgtctgtttaagagttgttcttcacacatatctaaatgagctattgtcttagttctttatgcatagactatagttttcctatgtatagcattaatcagtttgttcagtgaagttggcttgcagcttgttacctggctgccatttaagaggcatgaattaaactgctatagtttgtcattatcacccactaaatataggaatttggctggattcaaacccttagtattatagattagtatctaatgaaatgttcttgtacacatgctactaaatatataattttctgaagttttttttttwaagtgttctttcttagatttaataaactttcttggtgtaaagcagtctatagcatggctactgctgatgcttaaaatagacaaattaatcccctgtgtctgactgtatttgtttacagaggaattatttaagattctcactcagggatgtgatcctgttgaacagcacctgcaaattcacacaatctaggttttatgggagttactctaggagctttggggagagaagagagaaaggcatggcagtgtgtgtcggggtgagtacttcctattcaggcctggagtgctgcagggtgatgaagacaactagaggtggaaggatttgagggcaaggcaagtttgcacattatattcccaaggctgctttgaggttgtggagttgcaatactgtttctgaaatctgaacactcagtgtcaataggacatggacttgatttgtctgcttatcccgcctggtgtacatcccttcctcagaaaggccttcccccgtgccttgcagaccttgcttgtttgatttttatcttccctgctagaaggttagcccactgaaagcctagaccaggtcatcaacactgtcttcccagcgcctggccaaagcctggctcacactaggtgctcagatatgcagtgacgggagtagctcaattcctatgtattcgtctagaataaatctgctgtcagcatgctctgggcaatctgtttctttcttggtatgccttaccttggttagacataccacccggcatcctatccttcatttcagtggtttaaaaaatatatgcccgttgtctcttattgggaagctgagcagaaagaaaacagtgtctgttttcagaacyggtcctggcagcaacactcactgatgcctgtccctgcccatgggtggagcagtggggtgactttgctgctggctgcccattggcctrtcctccaccctctgctctcctgagaagtcaagtgtggattttgtctgctagttacctttagcccagtgggcagcagcgtggggctcggcatgtgacttgtgccctgagagaccttggtaggctgggggagcgcagctgagccctgctaacccccgcccacttccaggctcattgccctcttctgtgtctgcagtggggtgtcacctagtagtcagctgttggtggcacagatggtgagtggttttgttaagtgctggtgccttctttccagaaccatggcctgaagaaatctgcttatctgttctttctttgctgtcatggtaaaccttgaaatttcgtgtgtgtgtttgtgtgtgtgtgtgtgagtgagtacacttacatggattcattgtagcagagattgaatgagcagagcaaatacattatgttggttctggtagtattaatggcctgtaaaacagagaccattaaatttaaaattaatttcatttaaatttaaattttagcagaaaatttctgtattttaacaaagaaaaagagatgcaaatcaaaaccacaatgcatttctctgatgaccagtgatgatgagcattttttcacgtgtctgttggtggcataaatgtcttcttttgagaagtgtctgttcatatcctttgcccacttgtttgttgtttttcttgtaaatttttgttttttttcttgtaaatttgtttgggttctttgtagattctggatattagccctttgtcagatggacagattgcaaaaattttctcccattctgtaggttgcctgttcactctgatggtagtttcttttgctgtgcagaagcttcttaattttgtctgaacactccttgtaggcagtgtttttacctgcgtgctttacttgttctgcactcaggatgaatcacagagcgttggtagaggaaataatcataaaatctaatatttttgagcactttctaacgtgtgtgagatcattcttacctctttatgtgagtcatttagcagtcagaaaagccctgcgagataaggtgctatttccgtctccatttacagatgaggaaactgaggcacagggaagggaggtcatatgtcccaaatcatacagctcatatgccagggaggcagaatttggctctagcatctagggtctttttttttttttttcttttttgagacggggtctcactttgttgcccagattggagtgcagtggcacgatcccggctcactgcaaccctctgcctcctggattcaggcgattctcctgcctcaccctcctgagtagctgggattacaggtgtccaccaccacacctggctaatttttgtattttttgaagagatggagtttcaccgtgttagccaggctgatctcaaactcttgacctcaggtgatccacccgcctcggcttcccaaagtgctgggattacaggcatgagccaccgcgtccggctgcatctaggatctcaaatactattctgtactttctttccaacactgtgctgtattccctctttagatatctggtggttggtttaaagtttatgcacaccaatttatctgtttgtttcttttggctataatgtcttggggagtgtaaaagaaactcatcttaccagatagccaactatgggtttcccagcatttatattgccactgttgtcgtgtgaggagtacagaaggtgaaatttacattggtgtgtttaaccagtttgggaacttgttctgagatctgttggaagaaatagaaactgatgrcccttaggtggtttgggcttgtacttccccttcactcatattcccattagccttgacaatgagagtcgagtgtttttgattaggtggatggacgagagcagagacgtagtagcaaagaagaaaatagaaacttaaatctacttatttgagtttttatgggaagaattcttcttgagtaaaatctttttaatatggttaatgaaaggaagagaatggggttttttcaatacaaggtaatggagaaatagaatgaaaatgaaatcctaaagtgtttttagaaaaatgacacttgacagccaggaaaagccccggatcattagattgtgggtttaatgcctggactggccgagcagctacccaattagatggctggccggtggaattttkgagttctggagaggggtcctgcttccctggaacgaacgtgacatttttctctcccaacagaattcagcttagagaactatcaacacaggacaatgcaagcccatgagctgttccggtattttcgaatgccagagctggttgacttccgacagtacgtgcgtactcttccgaccaacacgcttatgggcttcggagcttttgcagcactcaccaccttctggtacgccacgagacccaaacccctgaagccgccatgcgacctctccatgcagtcagtggaagtggcggtgagtggagggcccascctgcctcgtgcgttttctccgcatttccccagatgagctgagccctgttgaatgtgatagccatcaagatcaaatatttgtttataactgcactttgtaaatggaaatgtgccaaattactgatggtggtaaatagaggtacagggcaaaatataggcacagggacagatgagagggtgtcggttgggtgtctacctctcgtcacatggaagatcattctagaaatgacattgagtttctacgctgtggtaggcactgtggtcagcctggaggattccataaggaaaaatatagcacagaacccctgttctcacagggattagattctggcaggaatgagagttttcaaacaaatgttaccaaaagaatgcactcgtggtacatctgacgcttagaacatatccctagcctgttggaagggactttgggrtttcaaatagaatagggctggagtaagaacttgacggaagaacacggctgcagaattcggggcaggacatgaagaaacaaccctcaagaggcgcgtctggctgggctgctgagcgccgtggttgtgtgtgacttgggcaaactggaggctgtgctctcatgttaggaaaatgaaactggaatgcgggcaattagggcttaataggagggatggcgtaaggaaaccttaggatcctttcaggaagattcttagtgctcctgctctccctgccttccctagtgagaaaggcagggtgtggagaagatgaagaggccrcatgctcactggtgcttccactcctcacctgttctttggttttctctgtggtcgcttgctttcccctacccaagtcagtcacccttcagtgtttcccgcattcagcagatatgcagaagaacattgtgaaacacaagatccccccatttactgcttccagatgtaagagatggaaggcctcccccacccccccgggctgactgccgcagagggagtgtgtgcccttccacataaagccctggctggagtcagcatttttgttatttatgggattctaggtctttgttttattttagacaagttcttggattcattaatgtgaaactcttaaaatatataaaagattcttcagtctaattcatgccaaaatataaatatagaatgactgaactacagctgagaaaagttaactttctacttgatttctatttagaaggtcagggtaccttaatatttcacctcagctaatcacataggctggggaatgagtggaatctcccttttcctaagggattcctgtgaggttctggcattccttctctactggcagagcacctgatgtgtcacggcagcgctgccatctccatgaagagttgttggcaagtgcagtgttaagacatgtataacttagcagtaactgtaagaaatgagtaattcctattatatgagaaattgtgggggcacttacgtgtggttttaaagctttagcttagcataaaggcattgtgccttgttaaaataattacatatgttctctctagaacagtttaaaacttgagatatgcagcaagaaatgaaaatctataattttactgcccagtatagaggcttcctgatttttctctgtttatagacattgatttagctctgattttcagaatttgtggggcttagaaatagatactgagcttgctttgcctttttaaaaaagaagttaaaagtttaaatttaaaagtagctctggaattctggtgcttaataattrcagatgctttgatatagctagcatcatcctgtggacacctagggcagggaaagaggaacttgattcacttcataaggtaccggtgaagagcctgtgcatctggcactgctgcggggggctggtggccggagtggaatattgttgctgtgttcctactttgaaaacaagtaagcagggtttgccagttcccaccctcattctgcacccccatctcacatgcacagtttttatcaccctccttgtccaataaagtttacacggatactaaaatgagaagaatccgcactttttggtttggccacttctcatcacaacccacgctggctgtttcccagctactgatttttaaggcagtagcacagaggttctttgtaaattataccttctgaaatttccttttaaaaatcaggattgtagagctgggtgcagtggcacatgctgtaatccctgcactttgggaggccgaggtgagaggattgcttgaggccaggagtttgagaccagcatgggcaacatagcaaggcctcatctctataaatttttttattttaattagttgggtgtggtggctcatggctgtagtcccagctactcgggagactgaagtggacgaatcatttgaacccaggagttggacactgcagtgagctatgactgtgccactgcactccagcctgggcaacagagcgagaccttgtccctaagaaaaataaaaatcagggttgtaaagaggaggttaacactcatgctggtcacctctaatgaagacctaaattagagaacaggacagacaagctgggttaggaacagaatccaaaaagtgtttcttaagtgttggagcccggactgatcagggccctgtctggagaaccacgtccttgtgtctgtagtggcagctcacagtcataactgtgatgccctgcgtgccaaggaagagcttctatcttctgaaggattttgctgctgctgctctgtgactttgagcaatggatagaagcagattttgtgggtttgctttctttttacatcactgtcacagataatgcaagatttctggtgttagccagtgttccggtttagcctggctacatgttttagcctcttctctgagattgaagccccatggccccctagtgaaaacgatcttcactggagtgactggaaaccttttcggattggtcggagcccagacacacgtggttgcagttaagcaaagtacaggagcatgttggagcggaaagggaccagggaaaagagggatggggcagatgtgggactggactccaacttagaccaggcaaccttgggcaagttcaccaggattttctgaccttcagattcctcatatggaaaacmgaagtgacagtacctttcctccttcagtgttgctaagaggactgaagagttatgcaatgtctgcttggcccacaataagtatgcagcaatgttacttttttccctttgtcttttaatcttcatattttatacacaagaaaactgagtccaaagaggtaaaattatatcatacagttagtagaaggtccagaactctgttatgctgccttcattatagtagtagaaagttgtatattataactagggctttggggaagggggcagtaaaccaggatagaaagtttggatctgtccagatcaatatgaagagtcagtggcttgagcctctaaacccaggagcaggcttgtttgtttgtttatttatttagagacagggtctcgctctgttgcccaggctggagtgcagtggtgtggtcatagctcactacagcctcaaactcctgggctcaagctgttctctcacctctaactccagagtagctaagactataggcatgcaccaccatgcctggctaattaaaaaaaatttttttagagatgaggtcttgctgtgttgcccaggctggtctcaaactcctgggctcaaacaatcctcccaccttggcctcccaaagtgctgggattacaggtgtgagccacagcacctggcctagagcaggatcttttgaaaatggatatgcaggcaaatgagtctaaaggtagtgatggaaatggaaggagcaaaagggacaggtaaaataaaaacagagtctaagttctgttgggtataggatcagaaattgtcaagaatcgggtagtgggctgggcacagtggctgacgcctgtaatcctagcactttgggaggccaaggtggatggatcacctgaggttaggagttcaagacctgcctgaccaatatagtgaaaccccgtctctactagaaatacaaaaattagccaggcgtggtggcgtgtgcctgtaatcccagctactcgggaggctgagacgggaattgcttgaacctgggaggcggaggttgcagtgacccgagattgcaccaccgcactccagcgggggcaasagagcgagactccatctcaaaaaaaaaaaaaaaaaaaagaatcaggtaatggwgaggactggcatgaarggggcacaggactgtgaaaacctgagtgactctgtccttccctcatcctctatccctgaaccaggtcagacatagatggaatcagagcaggagttggtgttgatgtggtttcaggtccacctatcagagtttgagagatttaggccatgaaccattatgaatatagatgagaacctttgtaattgctgaaggaggtagtagtgcaggcaagtcctgtgtgcaagacctgctgctcccagttagtacggacccctgtgacattcacagaagttcagaatgtctgagatgctctgcaggctaccttatctccgtctgcagctacacctccagtgatcacaatcagtgctacgctggcacagccagcctggccctgctctggattggaggcatcctcaagggctgcttgctgtggaagcagtttcgctggaccgagaggagccactggaattttgggtactgggccttagggtcacccgggaatgggaatggctgctgtgtggccctgtttgccagagggggccattggtgatgagccccatgcaagtggcatctgcccttcacctgctccttctaagccagcgggatggagaccctccagagagaatatgtgagttcctctccttatgagagccgtggtatgggcattgagatgactgacttgtcaaattagttcggaaagatttttgacaactactacaagatcataatgtacttgaacaaaaacctgtgatatgtgttatttgtttgtttttagatattggagaagggaataaattttagcaagtaaaaacttttttatgccttcacgtcttttctaagacttaattttaagaatatcagaacctggattaaggtttacttctggtgactaacccagttagtctatcacagattcactgtttagattgttatcagaccttggttccagcatgggttcatatcttacaatacacagaaccagttccttgggtataactgatctcgtttcctagttggatgactaaattccacaccaaacgatctcttgacctccaggtcacatgctggccggtggcccttttgcatgagagattgaaatttgtacatccatatgttagcatatatatggttagcgacttgctttagcattttaatcctatgcttcataaagcctgccacagaggatgtggcgctttgggtttcattctccacaagtcacagagaatagttatcagatctatattcactcagcaaggacttgagtttttctggcatgatgtgcacagtaccagggcagagaaggctgctgccctcagggagctccaggccagcaggaagtaccgctcggaccccttgtccttggcagagggtgagagccatcttgagactagagcagtcaatgcaagtgacttgttttcatgccatagaactacagctgtgggttcattctcaggtaaggatttggaagaagcaaactaaaggcaacatatccaggctgtgggagccacgctcaatcaacagcatggtttacaaytcaaaagtcacactccaccagaggccttctcagtgtcatggcctgcatgaacaaaccacagacctccagctcacatgcacactgcaacaaggactggcatccttcatccatgtttagaggktgtatatggagcatattaccaagtaggatttccccgtgtggctggtggaatccctcatttccacgtaaccatacttcacacatgtaygcatgtaaaggcccacttgcaaactrggagaartaatttttgcaggagaagagagcagctcgttgattcataagtttttatgaagactcacaccagacttgtggaggtaaagcaagtgtgggcctatagggatcatgccagtggaaacgctaagggcggcgagacacccttctggacttgagtggctggggcccgctgtgagcgggagctgttgttgatctgggcaggattacacgtgtctgtgaggcagacatttagagacaagccttagtggaaactgccaggagtgggcaggaagggagctgtccaggaagggcagctggggttgagttggatggtggtgtcactcgccctcactgacaccagcctgatgggtctgaagaaggwctgtcacagtcagttgcaaggcagggcaatagatgaatgattttgaaccaggtgggaggtatcaggtgaacgctgagaggcagggacaagtattaggaacagtagtagcatctggttgtttctgcagtcatttgtaaatatgacctaataaatactgtttctacagtcatttgtaaatgtaaacctaattctcatctctgggaagctttggaacagaaatcagttatccgatgtgtatttaactagaagcctgtgtgagacttcagaagaatctcctgatccaatgctctggttacatccctatccttcatccttatggaaatctgggatgtttttaggcattaacttccatttattaccatatgtgattgcagattccgggtcagtgttccccatggcctgttattccrtggtcttgatagcaacataattgtgcaaatggtcaaatgaagatgggagcaaagatttccccttttaattctacccctagcaactttgctgacgttgtgctcagagaattcctgaaaagtattccagcatttgaggacatttgcggcaagcgatcctggcagttggggcagtggggtggtgtattagtcagggttctctagagggacagagctaataggatggatatataggagtttattaaggagcattaactcacaccatcaaaaggacccaaagtaggccatctgcaaactgaggagcaagaaagccagtccgagtcccaacgctgaaggacttggagtctgatgttcgagggcaggaagcatccagcacgggagaaagatgtaggctgggaggctaagccagtctagtcttttcaaattcctctgcctgcttttaattttggccatgctggcagctgattagattgtgcccacccagattaagggtgggtctgcctttcccagcccactgactcaaatgttaatctcctttggcaacaccctcaacagacacatccaggatcaatacttcatatccttcgatctaatcaagttgacactcagtattaaccagcatagctgggatggagagactatgcttagagggggtgtttttatttagaaatgttattctggcagggtgcaaacatcagcattttcatgccttgaggtaacttcagcaccttttctaaaacttaatgagcttcttaataacaagttatgaaaaaccttgctaaattacattttcttacaaatctacattacaggaaacaattgagttgctttctaagagactgtaagacctgtctgctgacttagggacgcttttaggtggctgaattaggtgggaaaagtgttagagctggtaatgagcagtggtggttgggtggggtggcctgcagggtgagaactgaaggcagagtttctgatctttatgccaagaccaggccacaggagtattaagtgcctggcttaggaatttaaagaaagaaagaggttgattgttatatttaaaaaactatttccgggctctctttacccaggaagaaaaagctaaaggtcactacagatacgtagggaatatgataaagcaggtctgaaaacacaatttgattttgtacaaatgatgtcgcttctcacaggcttcattaaacagagaacgtgtttgatgacagaaacgcataaaggacrgaaatgcgtgctgtaatatttacttatgtttaaaaatagccagatggaaccaactggtgccaaatgaaaaatgaccagcgtaggctgtgtttcttgacaaaacaccttcagcacccattgtccaaaagctgaccaaaggtagtagatgggaatgtggctccctttgaactaggcagaagtgaagcagatgccttgtatattcaaatggttggcatgtaaatttctacgggcagtcctattttctggaacaatgtgtrtttgtaggaatttggacattgtgacttcaaattttcttccctttcattgaggmgggtttgtggtcagctgattttttttctggtgatgagatgttttgcgaagtaccgtgtcagcctcctacccctacccccgtccctcttcagcaaatcctctgggatagtggggagccgggaagttggaaactggagatggactaggaatgaaaagaaaaaaggttctgagggttaggagcaagtgttgaaaaatcagaaaacccagccaggcacaggtgacctggaccccgcctcctcaaggatgaaggatgtctccacacacagacgaaggaggtgtgggcatgtttgggacctgcctgtgaaccgccaagcaaaccttgacgtacctggatgtctcattgagctaggttcgaagctctgctccactatgtggtggacatgggactgagaagggaagcagcccccccaagtctgagcttcctcatctggagaggggctggcctttagcaggctccatacacattcactcacctcccatctttcctgcatgccagtgtcaggatagttctgcccttctgtgctcagctgggaggaaaggatcttgggaagtcagctagttcagtagtgagtacgaatagtgagcgtgaggcctcattgttaccttgtgacatttacagttcactgtattggggggaatctgggaattttaaaaatatctgtccattgtcatttagaaattattgtggagggggagttgcccaggggctggcctttaaaagacctagtgtaatatatcaaagatgtagtctgctagatatgagaattgatggccagagttcctctctgaaaggtcactggatggaaaagtagttttgtgtctttacaaaaagaagcacatgatggagttctgagcaggctaagatgcgtgtaaaatgtaaatgctgagaaggacgcggttggcgctctgtatccgtggattaaaaatattccatggaaataaatggatggtattgtctattgaacattgccagacattttttccttgtcattattccctgaacaatacggtataacagctacttatttacatcatattaggtattgtgagtaatatagagaccatttagagtatacagaaagatgtgcataggttatatgcaaatactatgccattttatatcagggacttgagcatctggatttgggtatcctgaaggggaacagctgtatagaccacatgttaggtattagaaggaacaaaaaggaatcatttttacccccggactgtggttctacatgctcctttgcaccctagagatggatcccgcattagaacccagccacgtctttggcagtctctttagaagttacttggctctgcctctcccccttctactccttgccctcctctctctcactctcccttctcactttcgccctgcgtccacctccctatccctctcctgcataaacagtagcaacacaaggggcatttaactgctatggctggcagatgcccatttggagatggagatgaatgagtctatgagtggtaaagcttgggcttctctacccctaagaaatcctcaacggcatcatttgcttttgcacttaaataggagagtggcacaaaataactggccatcgcgttcctgttagtcaaatattggtgagagttctggcctcggaaacctttgatatgcagatgttcacggttttcctgcccttcctgcccccaagggggacttgaacttgtttcctaattcagcccttgtggggagactgacctcaggaggaacctgagcttgtagagatgttgcggaatatactcatgaccaccgatttcactgtagtgggtttgactcactatcttttttttttttttttttaactgggaacactatgtaaccacattaaagaggtctatagcaggaggaataaaagactcmtaaagcctgctgactcactggctcatgactgatttcctacacattcagctggggttgtctgctttgcttgccctgtttcttgagcccaagcgacccacacacactgcctgctgatcagtaggttatgtcagaaggccgtaagggccaaatttaagctatttttcatttaaataggcgtccctagaaatagctacgtggacttacctaatatagtatttaagtccccagcttttgaagtgattctgtcttgtaaaacctacaagcatttcagactccaattgttacagctttgcttcccagcactcagcttgcaaccccttgcttgtgtagatataactaaggttgctaacacccttttttaaatayagcatttctgttcaaaaaatagcaacactgggccaggcgcagtggctcacacctgtcatcccaatactttgggaggcctaggcggaaggatcccttgagcccaggagtttgagaccagcctgggcaacatagtgagaccttgcctctacaaataataaacagattagccaagcaaggtggcacgtgtctgtggtttcagctactcaggaggctaagtgcgaggattgcttgagctcagtcagacggttgagacggcagtgagctctgataatgccactgaactctagcctgggcgacagagcctgcccctgtttcgggaaaaaaaaataattcattattagaatgtgtggtcttctcatagagccacagattttgaagcacagatcctaatgttttgtgcccttccccttcttattcaaccccctttcttgaaattacagttatgtctgacaactgagtgacagtgtgaccttttatcccgtatcatcgagccttcaattagtgtctccttttgacagatgtctcatttactgcttcattttcaagcttttctcattattctaattgctaattagggtaataataaatatcttgccccaggttacatgtcaagatgttgctttattggggatatcattcacttctttaactttgatttagcttgtttgcctccatgtttctcggattccagaagattatacaccaccaaaaacttaaacctaactaaaaaattatttagctaaaagtttgttataaaatggtcctccagagcagtggttctcaaaataaaatttgggacattgaccaaggtggttgacctgtcttgaagggatatggtctctgtatgtccaaagctaaacttcatctcttttctgaagcctacccccagtacccagtcttctatttgattaaaggggacagtttttcttctcagccctccttctttctgcttacaccccattacctgttaaatcctgttcctgagtgctgcagcacgcccagtgccttggtccttcccggctcccaactcccactgccctatccaggtctgtaggagttggtttctccccagtctcttccctccctcctgttccacacactgcttacgcttcttgtagatttctttctaacccattagcccatcctcaccacttccctgctgaaaacttccctgctggaaacctgctgtccctaggaaggtgcttctcaaactttagcatcccctggagggcttcttaaagcacagattgctggatcgcatccccagagtttcggattcagcaggtctggtgtgatttgctttcctaaccagtgccaggtgttccgcagagcacactttgagaagcttggctctagaatgagcctgtgcacctgagatttcaggcttgcttctgtctgttcatcctgactctccctgcactcttctgctcagccagggttccctggagtccctgtggtcacttagagacaagacgtgggctccttcagaacaagcttgtgtcttgttcaccttatccccatctgcccattcacagctaggggaactcctctgcagagtgcagaaagtggtgttgcttttgaagagagagcactgaaaaagaccatgaatgcatttctgttgtgtcaagaggtatagaaggcacctttgtaagcagagcatcgtgaggacctccctgtgggcggccaggccacctgcatgtctaggccatgctgagacaaccacacttcaccatcatacttggtacttttcttatctcttttcacaccctctcattcttcctgttttctctcattttgtcctttccccctttctcttcctaccttagccttggtgccttcggtgtgtttggtggcttcatgggttgaaaaggcttctgatattcactacaaagccacaaaattgcttctgaatttcaggctatttgttggagtcaagactgaggtgatggaggacttgtactgtagttagagcatgttatcgggtgcacaagtaatattctacacaatcatattttacaggaaagttcctctttaacaaaaaataaccctggaagtggactcatgatgtctccattttacagaaaagaaaacagactcagcgattaagtaacaataatgcgtgacactaagcaaagatattctcccattcttatgcacacagagaataacgtttttgcttcataaagtagtgtgctgtagttagtaagcatgtttggaatcacagccataggtgttagaaagtttctgccgagagagaagacattgtgatgattaaaagatatggttaggtcatatttactccagaaaactattagcagtttgggatcaagagtgaaatacacacatgtagcacacagtagatattgacagaatgtctataaatgtataagcataaaaaaaagactgggaggaatttaccaaactactaatagtcatcatttttccttgatatacttctgtatcacttaaatgtttttaaacagtatatacattataacttaagggtggacaaaaagcaaaagagcttgtaggaagagaaatggataatcctaataaaaatagaagagtccatggaaacagatcaggcagtcatccccttctaaagggtctccctgtgagttcatcccctggcacccatccacttcctcctcagcgcggccctcctcagcctgccgccctactctgagacctagcttttccrcacttctttttggtgtctcctgttttgtttcatcacaccttaagccagaaacgatctcttccacttttggacagctctctcctcttggtaccagaggttatcatatcacagtctaatttctccaagggtttccagactgttgtaaaagtgaaggcccctctctgaaattaaaaaaaaaaaaaaaggtaggctctaacgtcatagtcactgagcttttatttatcagtctctaaagactgctttttggctttctgtggatgtctggatgccttacagtgtcctttggccccagaggactcagcagctcacattggagacctgctacctgtaaagactactgctgctactgtgggaggctaggcyctgccgccttatccatcattaggagttcttgcacatagcaaatatactcaggaagctaacagatgaagacgacttagagaaaggtgcacagcgatgtcaaatctgcacacctataaatgttgcacctaaaactaataaagacctgtgtctgcacatgcatatgttttgtagctgatgattttaactgttagagatgctatgcaagaaagtgaagtttctaacagatgatattgcgcttggtgaggagataaaatagtggaaatagtctcaaaaagaatataggtaacattttagaagtataaccaaatggggtttcatttccaccagagctgaacaggatcagtcctctgtgctgtggatggcagtggcttgagaactgtcaatgtgtgtagtggtggcagtttgtggctcttctcttgctctctttggccttatccggcaggaccagcacttgtaggtctgtaaacctgttttctctcttcaggcatctttctgacttagccgtggttccccgaagcctgtgtttacctccaggcgaatgattggtttacatcagcacatcttgcactgcagtctttcagcactcactcactgggcagctgttccgcaggtggccgcctagaggggtgcggataccacaggggcatattagactttatatttaatttttaagcattttattttttaatggacaaatacaaattatgtgtatttatggtgtataataggaacgagttcaggacatctatttttaataaaaatggtgaccatgttcactattagttggtgactgtagttaataacaatgtaccatatacctgaaattactaagagaatagattttaagtgttctcactacagataagtgacaagaatgtaaaggaatggatatgttaattagcttgatttagccattccacagtgcatagatgtttcactgccttctaacctgcccccctttctttttygatagggtagtggtggtgcacgaagatccgcactacttgacagcgacgagcccttggtgtatttctatgatgatgtcacaacattatacgaaggtttccagaggggaatacaggtgtcaagtaagcattttcctgcatttgcgtggctcccgctcgccgtgtttcatgaagaacgagtggcctttcagaaatgcacatttgctcctatctttcgcctccttaggatcgctcaggcccctctgtgtccactgtaactttcccagagtcggtcccaaagctcactggaccctctagatgttccctgtggccctgggggctccatggtcaaatatgtgagtgtcacatcctgtattttatggtgagtcacatgttacaccagtgcacaataggctctgacgtttcctgcaataaagaggtctgttgaactgggcccaatccggcatttttcatgcttacttgaccatgagacccatattttgagaaagaaatactgacatcccaggatggcagtgttctgttaaagatacttgggaaatgttggctcatgggattacccttaattattaactgtagtgtaagaaaccctgtgatatccagcatacctcctttccagcctctgtccctcccaggcctcctgtatagggccctcaggtcatactgaacttcctgcagagccaygactacctctgctctctcccagccctgaggctttgtgcagttctattttgctttttagaaatggggtcttgctatgttgcccaggctggactcaaacttctgacctcaagtgagtctcctgcctcagcctcccaaagcactgggactacaggtgtgagccaccatgcccagacttgtgcacttttttttttctttggacggagttttgctcttgttgcccaggctggagtgcaatggcatgatcttggctcaccgcagcctacacctcctgggttcaagtgattctcctgcctcagcctcctgagtagctgggattacaggcatgcaccaccacgcccagctaattttgtattttttaatagagatggggtttctccatgttggtcaggctggtctcaaactcctaatctcaggtgatccacccacctcggcctcccaaagtgctggaattacaggcgcgagtcaccatgcccggccatgcacttttttttcttgatcataaagcctctttctacccccagcctgggtgcttgatgtattctttaatcttacaaaactcactgcatttcaccttttctctaaaaccttcctagtctatcattttcatcccctacctctgagtgaagcatttcttcccttttccctcccagcatgttatattccttctgcataactcctgatggcacagaggtgttcacctggcattctgcccccctagcccgagctccttgagaacagggtggttatcagtcatctcttttcacagcactgacagtgcytggcacacagtgagcgccccactaatgcatcctcagtgaaggagggagtacctctggtttctccacccctctttctattttagccacttcatttttgcttataccaggtacttgtctaaaaatggtcttggaatctgtgctttgttatttaaatcctctgatgcttagcttttatttgggccactgctagctacattgtaatctttttacggtcaggaaccatgtggtattgctggctctatccctcatgatacgttgcatgtaatatgcactcaagaagtgcctattggccgggcatggtggctcacacctgtaatcccagcactttgggaggccaaggcgggcaggtcacgaggtcaggagttcgagaccagcctgaccaacatggtgaaactccgtctctactaaaaatacaaaagttagctgggcatggtggtgcatgtctgtaacccccgctactcaggaggctgaggcaggagaatcgcttgaaccggagaggtggaggttgcagtgagccaggattgcaccattgtactccagcctgggtgacacagcgagactccgtctcaaaaaaaaaaaaaaaaaaagaaagtgcctattgttttttacttgacactggtaacattggatgtctcagcttggcgagtttgtcccagtgttcccatagcacgtgcattaagccctattacaaaggaaaagcaagcttacttgtgtattatttaatttatgaacattctcaaagttggtgtcaaggtcagggtttgtctgtgatagtaaatatccatcaggtggatcagcctaacatatggcacatgaaacagtgtgtgtgtgtgtgtgtgtgtgtgtgtgtgtgtgtgtgtgctttgccaccaccacagagcacatatacggtaagtcctcagttaatgtctttgatgggttcttggaaactgtaacttgaaaaccactataatgaaaccagtttttcccataggctaattgatacgaacaggagttacattcccacagcgtatttctagtcacaaaaacatcaccaaacttctaaataaagaccacgcttcttatgttaaacatgaaataaatgtgagcgatacagacatttaggaacaattgataaaaataagatatttacctgtttattccagttaagggtcgtgggcggctggagcccatctgggcagctcaggatgtcaggtgggaactgccctggccaggacaccctcccatcgtagggagactcatactcacacccactcacactcacacactcactccgctcacccacactcactaggaccgtagagatgcaccagttcacctcacaggcacagctttgggatgtgggaggaacccagagttcccaggaaaaaccacatagatgtgaggagaacgtgcaaatgaaatgccgttatttgaggacctgctgtatacatgtaaatgtatatacattcatcgaggagcatggtgacttactttatgcttttgactctcctctgatctgaagacaagtcacataacttttctttggtcgcttgctccccctggaaaatgaaagtccttttatggatgtgtcagagaaggtgaaggaaagtatgtccagtcttcttgatctgtactcattgaagggagctgctttgcaggtctcgatttgcttccttcccccccccccccccgcccccgcccaggaggatctttttattctaagctttgattttcttaggctactgtagaattaaactgaaacaaaagagcaagacccagcacttggataaggggtcagaagtttgttgaatgatagaagcagcccgcctagagtttttaaacctagtactttaaaactgcaccaaggaagccatttataaagattgagctccctgcttctcagtggctctcatctctagctgcacttttgtgccatcggggagcttctaaaaaatactgaggcccaggccccatccctattcaactgaataaaaaattctagagcctgggtatagtagaacctggtatagtatcaagttcccctggtgagcctgcagcttaacggctagttctggagctggagctggcatatgttttctgtaaaaagcctggtagtaaatatttttggctttggtgccatatggtcttggttgcaactactcaactgcagcctcacacagaacaaaaatgaatgagtgtggctgtgtgccactatcactgtgtctacaaaaacagccagtgggcctgatttggcccttggctgcagtgcgcccgtctctgtttttgaggaataaaatcgcatcatttcatatggctaatgcaatttttttcccatctggaagcaacatctgattggactcatcttgtatggtgcttgttacagtctctgtaaatgggagagggtccgagaatagctcttcctgttttcatcaggactgtttttagggatggcaaagaagtcagtgtgtccagcctgtgtcctcctcagccacgtggctgattcctgaatctgcatgtgcagcacactgccgttgtctggggcatgatctgtgtgatggggccagccctgccttccatcctacttccttaggtcctcatgtcaaatcagagcctcctcacgaacactcagacctaatatgctaaagccagatgcactatggtccccttttgcttctttgaaacctgaataggaatcgggaaacatctcggtatttcctaacttttgcttcccagataccgcttcacgtcacctcattttgcatcttttctttgtttttgtttttctgcaatcatgacttcacccatgtaactaggattccaggtaattcttgatacctttggtcatcaaaatttggacacataaagaattatattttcctttccgtattctgaattagaatgctttagacttcttgaaaagttttgatgaatacctcttctgaaaaggtatctgtttaccactacagcaggttctctttaccactcatctgctgactcctggtctaaaccagtagggtgttaaagaggaatcacaaattaagtgcccttaagagttggrtattgccttttctcccctctgtccccctctcctgccccacttaaacaaaacagaaataaacaagcaaagaaaaaatcagaccaaaactgagggagaaaacatttccaatctgaagccaccatttcttatctgaggactaaagtagagtctagctgatgtttagtattagagtgcggttgggatacaaattaaaatctaggaatatttatgtacgttcagcccatctgttgttttttctctttttttagataatggcccttgtttaggctctcggaaaccagaccaaccctatgaatggctttcatataaacaggtgagtttgtatgagacaggctctgtggactcctcttgcaagcaggggtgcttctgtatgtgcattcttggagcyggaaggtttctccagagtgtatgtgctggaccagctcagagccttgccgtaagcatggggcatccaaggagaaacttgacacaaaggtttggggagaacaagttaaggaatttaacaggtggttcaaagcattgtatttcaaagctgatgtggatacattgtgaagtcaagtataatttttaagataaaattctagaaaytctcccggtccccctggcggcatagcattatttctctccacttgaggggtactagaaaaactcagaagctggaacgtgggaatacatcttcatttcacagatgagraggacctgtctcaggaaaagaggtgactcacccaaggttatagctggttagtggcagaaccaggaccagaagcaaggcctgcagcctcttgtgtaggctttcctagtgcrtgctgctgaccctcaaagctgtccttggccaactcaccacctgtgtgacacttacccccaggcagctgtagggaggaacacagatgttcggggaaggcacttgtgttactgtataagcacaaaggaagctgggatctgagtatggtggcccttgtcggtctctagtccccacccatcaacggctacagctgttgaaacagcggctcatgagtggcagtagcagtgcaggaagacgttgctgtttatttttatttttatcatgattacaatgaatgtgggtgccacagctcttccccagtccacacggcaccccggaacaggcacgtgctccagacaggccagctctgctgcctgctgcttccacacagctgtccaggaaaggctcccgtcyctggccccccttctcctgctctmggggcaggtaatcatgcggattcrtgaatacaaatgcacttcctccttctgggttttgtgtgaagggcagcttaggagctggtgtatttggggtgcgtctgtggaagggatcgttctctgcagcctcggagccacactcctgcagtagtgcttgttggttcttctcagactgaagtgcatgatttctccccgtccgtcctctggggtcgacaggatgcagaaggctttgcttgagaggtgttcatctgtctctcaagagaaggggaagcaacttctcacacctcccctgtagaaggagctaggggcagtatctcacatgattggaaggatttcccatttttattctgtcctgtcagagccaaatagtagtttcttgcacaaatagtagtttccaggatccctcattttcacaagtgtaagaacagcctgtgtgtgttgaacatgtgtgtgttgtgtgtgatggtcctgaggcatcatggaatcctctgtgcctcctgggttacttctgttgtttagtggctggaagagagaagacacgtccattgcagataggcgttttcaaggcagattgaaaatcactggggtttctgaaggtgtgaatctatgacttgcacacttcatttggaagcaggtgaagatacaaaactgaagccaactttggatttgtacattcaaatctttttttttttttcagtcatccaatgaatatgaccttttggtggctaggaatgccttaaagggttgttttttttttttttaagaatgtatgaccgatctagaaatataaatgtgcgtgtattattcaatcatatttaccagctrtatagcatccaattgcaggcttttctcaggctctgattccttaaatgcaaccaagacttttgaactcgtctgtgaaggagagagtagtaatgagcctgtttgtgtcatcctattgtcaccttaccacgatcagtctgttccccataggcagggccaggatggtgccaaggcccagaaccagtagggttccaggccaggagtaggtatggtcttatttcctaygggtatgggtgtgctttaagagtactcttgagaatttgcgaactgagaataaagaaartaactccaggccaggcacggtatggctcacgcctataatcccagcactttgggaggccgacgggggcagatcacctgaggtcaggagttcaagaccagcctggccaacatggcaaaaccctgtctttactgaaaaatacaaaaatcagctgagtgtggtggcaggtgcctgtaatcccagctattctggaggctgaggcagggagaatttcttgaacccgtgaggaggaagttgcagtgagccaagaccatgcccttgtactccagcttgggcaacagagtgagactatgtctcaaaaagaaaaaaaaagaaagaaacaaagaaaagaaaaaggaaaagaaaataactgcaaagtttaagattttttaaaaattttagtttatttggggtaggaacagggagaggataggataaccctgctgaattttgcaaacctatcaatttttacttagttattataatatgcatttttatatttacatgtgttgcttatcattgtaatattgtcctaagtttgatagttttcataattataatatttactatgtagcattttcttagtgatttaccatcatttacttaatcatccagccatgattaggttttttaccctagagatttttgatgcaataattttgaaatatttgcatattgtttatatgtaggcttttttttttttttttttttttttgagatggagtctcgcctgtcacccaggctggagtgcggtggggtgatctcagtgcactgcagactccgcctcctgggttcaagcaattctgcctcagcctcctgagtagctgggattacagtttcacgccaccatgcctggctaattttttattttcagtagagacggggttttaccatgttggccaggctggcctcgaactccctcaagtgatctgcctgcctcggcctcccaaagtgctgggattataggcgtgaaccaccgtgcctggcctgtatgtaggcttttaaaaacctcctcctgagtttgaattgtttcctaagaatacgttctcaagaatggaactgtagaacttaaggataagagcttgctcttattttttataggtctctcaaaagttgctgtttctgtgtttataccaaataaacaagttttggctgctttataaataaaacaaatccatctctctatcatttttaaaattgtataaaactaaaatagaaaaaaatgtataaatagccctgccatataattgtctgtgacctgcagccattgggataagattaatttkctttgcagaaggaaccctgcggtcagttctcttaattctgatttcttgtgaataaaaccttgtgttttaccaaaaaatctatcaataaaggaatacctgcatgttccctctccgtttctgtgtgcagcattgcttgctggctgagatacaagcctgccgtctggtcagctttgtttctggagttggggcccartgctgcttctgactttttcctctccattttaggttgcagaattgtcggagtgcataggctcagcactgatmcagaagggcttcaagactgccccagatcagttcattggcatctttgctcaaaatagacctgaggtatgaaccagtaggtacttgctatgcatgattttgagaattctcagatataagagcctaacttctgctagagaccagattttgtagtctgatttctactaaaagtatagctttacgttacaccttagaaagttacacatatgaaaacctcaaccagggccgctgggcacagtggctcacgcctgtaatcccagcactttgtgaggccaaggcgggtgggtcaccagaggtcgggagttccagaccagcctgaccaacatggagaaaccccatctctactaaaaatacaaaattagccaggcctggtggcacacatctgtaatcccagctactcgggaggctgaggcaggagaatcgcttgaatccgggaggcagaggttgcggtgagccaagattgtgccattgcactccagcctgggcaacaagagcgaaactccgtctcaaaaaaaaaaaaaaagaaaggaaaacctgaaccagggccttttaatcgcctttaararaaaaaagaaatcacttttttggggggattattttagtttttttaaaccaggttcccaaataaaatccttagaacagataactaacaaaggagtctttttactttaagagtcacctctgtggttagaaaaatggcattaataagttatagagagactcagatacatttttgtcaatagcaggttcctttttttcctttctgaaaggtatgaggctttccctctggttggtttctagagtttaaaataccatgggtgatggggacagtactcactgctagccagccttcctttgggcagtctgtcattggtggtctaagcccagcacggtttctgtaaaccagtgtgtaaaagtgtgttagtccattttcatgctgctgataaagacatacctgagactgggaacaaaaagaggtttaattggacttgcagtttcacatggctgggggggcctcagaatcatggcaggaggtgaaaggcacttcttacatggtggcggcaagagaaaatgcggaagaagcaaaagcagaaacccctgataaacccatcagatctcatgaaacttactatcacaaaaatagcatgggaaagaccagcccccatgattcaattacctcccccagggtccctcccacaacacgtgggaattctgggagatacaattcaagttgagatttgggtggggacacagccaaaacatatcagaaactgagtttaaatgagcagctcttttggaagtattgcttatggtatgactcaatagattagtagatctagctggcttagaaaaatggaagcatctggcttgaagaaatcgaatttattcttatacctgcttgtgtccagaagacatgctgactcaatccctgtgctactgacttttttttttttatataaataaagatggcttcttagagttttgtggtctttcaaggggaaaacagcattctccacagctggactgtgactgggcttgtagaatttagtttttttcatcccaaatgaacacatcaaaatgtttgttttgatggaattttatcatgaatctagaactgcaaaacaaataagaaataggttccttcctgtatttatgagttcattcaacaaatgtttgctgagcacccactatatgtcagacactgtgttggggtgccaaagcacagtgactcggcctctcttcctgaggtaccacgtaaggcaagacagacctaaacaccggtgctttctctgtcaagtggtaagtgtgggcgcagggcagaaggattatgggagctcagtcaaggagggctccctggaggtggcacctgagtagaatcttgaaggaaataggggcggggaggccaagggaatgcccacrttcacacctgtgtctgggagtggagcattttcatgtggtggagtggcaggaaagacagccttcctcatgcgtcacatgtgcctaaggagctgggacctgatttctatgttgttggctgaaaattccttctgggaaaaaaccgaaactcagaagcctagttccaggccaagtggatgtgagtgggttgtgcccccttcccccggctgtgcctttttctgtcctgtgtgtcagagttctgcagatgatttcattagaaaggtgcagccggaggcagtggggtacccctgggtatggtagtgaaagagtgatctttcacctttgtccagtaggtagggcagtggctatgtggccagtgccttcagacacatcttactgcatcttgcatgtggcagtgtggccagttattgtctcacttctttcctgcacttttctagagggattttatcaaaacagttttgctgctagacaaggtacttcttcccctattccagggcatacagtgccctgctgccagaggggtcttccttgagccccacagccgctgttttgctgagaaactctcagtggctgctccgtgctctccagccagaaccatctgtgccagtcagatcgctctcactacccctgcttttgatcctgccatcccctctgttagcatctccctgcctccctctgtctctgtctctctctctctctttctttctctttccaaaggcaatctcagttacaccctcccagtagcatctgtagctaccttggccgatggtgggctttcttatctctgggtcagtccctgtctgataattattgctaattatcttttaacatatttgcctcaattcttcaggcggattttaatttatctttctttctctctttctctcctttcctttccttccttttttcttttctttctcaatctctcctctttctctctctgtcctctcatctttctttctctctctctctttccttccttccctccctccctccctctctttgtacatgcatacatacatacatacaggatctcactctgtcacccaggctggagtgcactggtgtgatcacagctcactgcagcctcaacctcctgggttcaagcaatcctcccgcctcagcctctcaagtagctgcgacatggtgtgtgccaccatgtccagataacttttgtagaggcagggttttgccatgtttcccaggctggtcttgaactcctgggctcaactgattcccccaaccttggcctcccaaagtgctgggatcactggtgtgagtcagtgtgcctggccttaatttctttttaagaagggggcatgtgttttgttctcattctgaatcccttatagcacctggcacagagtagtagctaacacagatgttaattttgctgcgtcaaatgttttcactttgaatctctcttgagtattgttctccttattgattacmtgatgacatcctgttttctctccctgacctttactgtttgtttagtgggtgattattgaacaaggatgctttgcttattcratggtgatcgttccactttatgatacccttggaaatgaagccatcacgtacatagtcaacaaaggtacgtctgtgatctttgcctggattattggcatagttattggttaggttcagtgactttacatttgcttayatttgatttgacaaagattttacatgtaaatatatatctacctttttattcaaagaatgtagtacttcaagtatccttgtgctggatatgacagagtgaatcttttaacatcccagagcttattcttcattgtatctcttcatttacagctgaactctctctggtttttgttgacaagccagagaaggccaaactcttattagagggtgtagaaaataagttaataccaggccttaaaatcatagttgtcatggatgcctacggcagtgaactggtggaacgaggccagaggtgtggggtggaagtcaccagcatgaaggcgatggaggtgagtgccctgcctccttcccttctctgaaggctttccctggggccgtgttggctcacacgtgctatccagtgctatctagtgctatggtgcagtcccagcgctggccggttgcctccgcaacccatgaaagagagcagaaacttctgtctcattgctggaaaaaggattctacatgtgtgcccagtgttaacacmtcacaccttacccaagtgctttcagcactccaatatttattccagagcactgacaagctgtgcccggaaatgccagaaatgggaattacagcttcaggcaggtggaactttcagtttctgtgtctcctttgggctttaatgccttttacttactaatttgtctctaatgccaagccaagtatagaaatcagcctcatcgttcttttccctggatggctcgtggagagtcttggtgaatttccaacatgcatgtttgatttggtttgttttcatattgactcttaagagtcataccaatcacaagtttaaaggcagccattccaggagaatgagcgtggtggtccatgctcagcttgggtgcttgatgtcagatgatataagaagttgatccccgtcagttggacttggattagagttccatccaaggaacatggccggaggaagatcttttcatatacatatcataacaagtcataggaaaacagagtcagtccttctctttctgaaggtgttagaaatatttttctgaaactgttatagataggattttaaatttttatgtgtagttttcctcctcctacaaagaatttgaggctataagtaaggatctgtagaacctttcctgaggaacccagtaggcacagggaagcgcgggtgttctaacagaaccttctctcttgtgcatgtgtgcgcccctgcccaactctctctctcagtagcatcgaacgtgattccgcaagtgctgacccgggtgcttccttgttgaattggggttttatagcttcttacctagtgtttccccacttctgtttttttacttttaaccctcttttactataatgtaatctctttttcccttaccttcccacagatgcaagaatttttctggtgttttttgactgctgtatgataaagaagtaatgttgaaatttaaaaattatttagttgattgaagattataatataaagtttatattaaaatattaatttatagaagacattgttttacacttacctgtttaatatgatctgtacttagtttttaaaaatattctgagcaaaaggtgaagagatcgccccactgcactgcagcctgggtgacagagcgagactccatctcaaaaaataataataattgcagtatttttcctaagtgatactgtaagagagatgtaaggctgtgaaacttttgtggcaacagtgcactaatttggataatgtttgttcccaataaattaagagccaaattgtatgtaactggtgctttattttatttaacatcagtttttgaagaattgggcatctccagaagttatgtaagaatttttaatagacaaatagaaatctggagctaataaaggttattttgaaaaaaatgtacagaattattgctttagcttttggctgacctctaattggatatattagttcctgttcttaatcggtggtctgtcactacatcatttaaaatgtaattaagattgaaaacttaatgtatgctgggcagaaactcactaagccctgagcacacccatctaatttccacgtgaattgaacatgttcaatggcgtgttcaatggcatgttcattccatatcctcattcaagctgttccatttgaataggaaaagaatataaatagttcatttgttaaaattaatagatattaaagtggccaccaagactgccctaatgcagtaaaccgaaccccatcagtggtagtgactggaagcctgccgctgggaaatgctgtccccgcgcaatgcttctgtcattcttaaccttcaagtccattcaggaaggagtcttagagggtctgctgtggcctgttttataattgggggctcccaaatcctatctccactctacgaggggagatatttgagcagatatttgagcctctccaaaatgcctagcatttcaatcgagcagagattgatttttcttcttcccagattgcagatgtcagttgtgcagaatgtgggggtgaggtagtgctgtgctctgatttgaggaacctacggagtatctgcagtatctcgttatggttaagaacagggctttattaaaggccctaataagaagtggaagtggggaccagaaatgcatggtaaagaytttggctgctgtttttttaatacatcctatttcaaagaccagtcctaataccgtttatgtrgttttatgtaagagaagaggtaactggaaaatggcttctcagaacaatgaataaatattttggttctggttaattaaaactgccatagtttctttaattagaaaattatgctgttttcgagccaggtgtgaatgaaccccacagtaaagccagctttaagtgactcgatgtgaccttatcctttacagttagaaaacgtttccatttaagactttttttctcttctaattaaggacctgggaagagccaacagacggaagcccaaggtaagcacaccgtgtcagaccctgctctgtcctctttgtagttttcaatatctagcctggtaccttgtggcttatagttctcttttctgttctgatttataccagctttttttttttttaatctttagcctccagcacctgaagatcttgcagtaatttgtttcacaagtggaactacaggtgagttttgagatagaattgcttctacatatggcagccrytggtctggactctcccctacctcttttggatgacttatcagctaacagtagacggaccaaaagcagaagagaaggaagtggttcaagtgctgtcttcttgttgctctgtaagatcttctcagagtccaagagtgccggataattcctcaaacatttattgagggtgatattagattcacctgtcttcctaggacagactatatcggtggctcccaggaagaaaatttctggtttttcttctcttatgactacgtatataccctttaaaatgtgcccatattaataaaggtttttaaagataagtcagtgtaaggattgcaggttgcttaggaatttagtgttcaacatttggttttcacgatatatctaacagtagaggtgtctgaagccctaattatgtgaggtttctgggcctccttcatttctgtcattctttaactttgttctgcttcatatgtgctccacaggcaaccccaaaggagcaatggtcactcaccgaaacatagtgagcgattgttcagcttttgtgaaagcaacagaggtaactttttgggatgtcgtcatctttcctcattgattgacattagtccttgagaatgaaagtgctgaaggtgggcaccagtgtgttaggtccatgtggcatttagaaacgatgtgacatatgggtaaggtcagaactttaggcccaagtccaccttctctcttttttcactttgaacctaatcgccaacccttgccttatgataattaaggtgaattgacagatgaagttcactgcaacatttatatagagaaactctatttggatattgccctagaaacatgtccaagaaaggacagagaagagatggactctcttgtgtttttatccagcgtccctgtatttgggaaataatttattttaaattggcaatgatatgttaaaagtttttgaatgattattatctgttgtggtcagtgtgacttccattgcactagaagtagtaaagccttgcacttcagctaatttcccatgcttttaaagtttactatccagtgtcttagtctatccagtcacagcagggccccatctacattgggagttaggatgttgacatacgaatttagaagggggtgatgtgattcagtccataacaccaacagcctattccaaacttgccttttaaaaaggtgcttattgaaccatatgccttttccttatactcttttttacatttaacataattggcttttgcagtctctttggaagtattctgtagctctgatttttgtagcaggagcctgagcttaatggctttggggaatggacatgtttggtggctgcagaaaactgatctttgagggatcttgccacttactttacttggctcacactttccaaatgccctttttaaagatgtatactttctaaacagagttcaacatttagtaccttaccaaagtgaaattttaatttcctaattggccttcaaacaaaacttaaaatgcattggtggctcattgaggcaaatgattacagaactttgtttaaagtcagttacaatatcaaatcaattacaatatcagtatcttctcagctttgtaagatgtctaatcatgataatggacaatatttttgttctgagtcagaaagttgaaaagtatagatagaatggagtccgatttctcattatattaatataacaatttcatcctgagaagtactacttgggatgcctgtcagacttgaataaaatccagctgagattatagcatgctcagcccacatccagtgcttctggggctgctgtgtttgctcaggattgatgctttcatccattgtcacattattattaagggtgacccagctttaggaaaggaaggggcatggctcagaacttggtatatcatcccctaggtaacgacaatgccctcatttcttagttggtatgacagcagctgctcttgcacaccccctgttttggccagaattctttatgttaataacatgaatattctatacaaaccctcactgtgcctgccctaagtaaggcccattctgagggaaaccagatgtccaaacttaatctgtctgtggacccatcatgatcagcattttataggagagcaaattcctgggtgccagatctgaggttgcattaaacaaattgtgatatgtaaagtagggctttaaggtattaaaaatattgatcaaactcaaaatactctaaggaccttggaaatccaccttcttttatcttctttcctcctttcccttaacaacataaaatgcaattttatgttgaaatgggtcctgtatttcttaaggtaaaattgaacttgctgggtactaggatactgtagtgatgaaatactaactgattagagcatataatcccttaaccttccaatttgagcaaaattttccttgttttgattaaagccctgaagtggatttactttgtcatggggagtgacttccactttgtttgaataattaaagtattgcttttttttttgattcagagtctcactctgttgcccaggctggagtgcagtggtgcaatctcggcttactgcagcctccgcctccctgattcaagcaattctgctgcctcagcctcctgagtagctggaattacaggcatgtgccaccatgtctggctaatttttgtatttttagtagggatggggttttaccatgttggccaggctggtcttgaactcctgacctcaagtgatctgcctgccttggcctcccaaagtgctgggattacaggcgtgagccaccatgccccttgtttttcattttattctttggtgagaagaaattgcagaccataagcaaaagccgtttctcctcagtgttgaggtactatgtgctcagaaataaaatggaagtttactcrgagtcttttttttttaattttattattattatactttaagttttagggtgcatgtgcacaacgtgcaggtgtgttacatatgtgtacatgtgccatgctggtgtgctgcacccataaacttgtcatttagcattaggtatatctcctaatgctatccctcccccctccccctaccccacaaccgtccctggtgtgcgatgttccccttcactgggagtcttaatgcttttctgccttgctggtgtctttgcttacagaatacagtcaatccttgcccagatgatactttgatatctttcttgcctctcgcccatatgtttgagagagttgtagaggtaggcatttaattttgttttccttgcttgtttgtgtatgttctgctaagttgttgtgttttacagaaagcacttcccttgagtgccagtgacacacacatttcatatttaccacttgctcacatttatgaacagttattgaaggtaagtgtggcgtgcggactgtcatccctatagagaattctctgctcagccccgttttagaaatggtgcagattatttgaaagaatataaattctttttctgagtatgaacaggatactggaatttaatcactcattttaaaattaggagttcagacttttgaaggatactaatgtggacatgagtccagaaaaaccaactataaaggtaaagtcattattaattcagttctacaaagcccagcgaggcttccgttctgtgagaagtctctatttttgattgtgcttgttcctaatgcacaagttggcttgcgactaattttttcagcaatattctaagtgcccttggagaaagaggatgatccttgagttgacctttgcctaggctccctgtaaycaactgtgtgactaattttaaaactgaccaagaaccaccttttttccttctttgacaattttggattttatgctgtaggaaaaaacaatgagcaccattcattcatttagtgagtagttactgagctctagctgtgtgccctctgctgtgttggagacagaggtgactatcagccgatgctttggatgacagctgccctgtcggatttgctcatcccaaaggatcgaaggcgattagatcccatctgccatctgttccttctacttcctgcacacctcagagtcttctgggtttataaagcaatctcacatgagttgctgtacctaacgagttttagaggtgtgcctagaaggcaggccacgctgaacaaaagctttctgagctgtaattgttaaacagtgaaccatggtgyacctttctcgtggtttctgcttctaagacagagaacatttgtacttcccttgtgtcatcttttgaatcttttctttttaaattttaaaataggcaaactgtcaggtccatatggcttgccagcatggtttgtactagacaggaaaaaaatcatgcagtgtattctagctgaatggcaagccactctggtattagataccctggtgtcacaaattcatcatacttggtggcctttcagaaacttctagttagattcaaacaaaagaaagtgagactttaacaaacttggactctaggcaagaagttaagtttttattttgagaataaattaaatgtaaagtttctggaaggcwatatatatatatatatatatatatttgagacagagtctccctccgtggcccaggctggagagcagtggcacaatctcagcccactgcaatctccgcctcctgggttcaagcgattctccagcctcagcctcctgagtcgctgggactatgggcacccgccaccaagcccggctaatttttgttttagtagagatggggtttcaccgtaacgtggccaggctcgactggaactcctgacctcaagtgatccacctgcctcggcctcccaaagtgctgggattataggtgtaagccaccgcgcccagccactaaaaatatttagaatatgtaataccatgtcattcattgaacagatacttaccaccgcactaaaagagtagaacctctgtggtcatcactaaaaacaacatagcctggttttttactgagtcccatatcttcaggataaccaagagaaataccacatttccatgttgtacaatgactagtaaatgcacattttttttaagttacctatatttaggaaatttaagatttctggaaactggcctgaaatgctaaaactgaaatgttggatgttgtccatatgttgtgtaacccctgctgtggtgataaaatgtttgttttttccattacccctatagtgtgtaatgctgtgtcatggagctaaaatcggatttttccaaggagatatcaggctgctcatggatgacctcaaggtgcttcaacccactgtcttccccgtggttccaagactgctgaaccggatgtttgaccgagtaagttccaagcagcgaagtcccaggactgagcactgacttggacgcaggggcttgggcttgaattgggctgtgccatgtgccatctgtatgamcctggacaatcctcccaatcttacaraacttcagtttactcatctgtaaagttagaatgcrtttacctctcagagtggctgataaggattataagagaaaatgcatgaacacactttgtaaaccatggtcacaacacaagcataatgtgggaggtcattttatttttacaataaacactttgagcctctgcttcctcatgtgtaacayggactgtttacctcttctctcctactgtttgtctccaaaagttgctaatgggatcacgtaagaatagtaactatgaaatggttttcttcattgtaaagctccttgcatggacatgtaaaacattacttaattggccacactgaaagaagtgactaagccacagcagagcccaagagaacaccagcccctctgcggtgggtatcattgcgtggaccgcacagccagggccaggcgcgaggggcatgagcaatctccagaaagagtgttcacttactctttattttgaggcaggacttttgttatctctcagaacgttcttatgtttttaatggttctttttaaaaggacaactttatcaacatataatactctgtataatttgctgatttaaagtgtgtaattcaaaggttttragtactttcacagttctccagccatcactacaatcaattttagaacattttcatgacctccaagagaaacccttacctattctttatcagctccccgaccccytccacccttcagcatccgctcatctgtgtatttctctattctggacttttctgtggatggaatcatgccatatgtgctcctttgtgactggcgtctttcacaagcatccatgtagcacgtattagcacttcattccttttaacggccaaatagtattccactgtatgggtataacgcattttatttatccattccttttttttttttttttttgagacagggtctctctctctgtcatccaggctagagtgcagtggtgttatcatggctcactgcagcctccacctccagggctcaagcagtcctcccaccttagcctcctgagtagctgggaccgcaggcatgtgccaccatgcccggctaatttctgtattttttgtagagatggggtcttaccatgttggccacactggactcaaactcctgagctcaggagatctgcccacctcagcctcccaaagtgctgggaatacaagcgtgggccaccgcacctggcctacacrttcctactcgatgggcatttggggatgtatgtgtccattgctcctgggtgtataccgaggtgtggaattgctgtcctgtgctgaccatgtggggccgttagaggaccggccaggctgtcagagcagctgtgccattttgtgttccccagctgtgtgtgagggttctgatttctccacactctttgactctggccatcctagtaggtgtgaaaactttctcatgtcttgcctcattagattttcggacaagcaaacaccacgctgaagcgatggctcttggacttygcctccaagaggaaagaagcagagcttcgcagcggcatcatcagaaacaacagcctgtgggaccggctgatcttccacaaagtacaggtaacacgtgactcacagccactgctcccatrgaaaccgacttcgcttttcagagttctgggagggccttttttgtgagagggagagakgaaggtaagggagagaataacatgtttttgttaattctggcacacatttaaaaactaaggcaaagccattaaggaggcctcagtttctaagatcaatagtattgcagccatctagggggaaaaggagtcagggtagtggagcctttctcattctccattttgttgcrtttttccggaacaagcgtgtcactcttgaggtaatttttcaagcatgagtgataacgtgtaacaatatcatgccccccagaaggccagaattgtggtagttgccacagatctgcccagttgtgttctaattccctgaaatagcttckgcagaggtggggctgacttccatccccattgggagggaacagggcagtcacgggtggaaacaaaccgtagccctgtgctgccatcatgagggctgtgagttctccgtgtggcctccgtgtggtctgcagctatgggttarggaacggggtcccaagcaggcccccttggcggagaggccgccgacttccaggtgtgtaaccctcaccttctcccactctccctccctgaaagtcgagcctgggcggaagagtccggctgatggtgacaggagccgccccggtgtctgccactgtgctgacgttcctcagagcagccctgggctgtcaggtgaggtggatgtcacggcgcctgattctcccacactaggatgcccagtcctcttctgcaccaaaagtcatctgtackgtgtgtgtgtgtgtgtgttctttcttaattgacaagcgtatctatatttatggcgtaacaacatgatgttttgatgtatgtaatatgtaaacattgtggaatggctaaatsaagctaattaacatgtgtcttaccacccatacttttttttcccacgtggtgagaacacttggaatctrccctctgggcagttttcaagtatatgatacattgttgttagctctagtcaccacgtggtgctatggagctcttgaaccagttcctcctgatggagactttgtgtcctttcaccaacatcacccctatccttcccaccccctactttgtgtgtgtgtgttatgtttgtttggaagatatgttattattaggttgcttggagaagcaaccatatgtatattttttaccctaggcaggggaatgtgtgtgtctgccatttgttgaattttctctaggatcaggtgcaagacaacctttagaagcaggtatgcagctgtggaatgggtcacaggtgatgagcctacccgcacaccatgctgacaacctgtagtaaagggagaaaggaggatttggtggcagacggggcatgtgtggggtacatgtcctgtgaattggccaagggagttcactgctgctgggtggtgaccagtcacataggggttctccctcgcttggccactggaagttaaatagaaggtgtacctgggtgacggctggtgttggcgtaaagcacactggaccattgaatgaacttactgaacagaccatttgaaatgagatttcaccagtcagccatgacttgggagttagtgagacttcattgcttgtgcacytccagtaaaggtgtgattgtgctctccttaataatgttgcatctcttggtgccccagttttatgaaggatayggacagacagagtgcactgccgggtgctgcctraccatgcctggagactggaccgcaggtatggctgtaggaggctcctttttggaattttgttattcatactgggttattggtatgtctggaattgggttaatcactgactggttcattaaccatcttaaacaaaagtgctatgtttctgatcattaggctctgggggcaaacactcttgtaagtcagggcactgtggggagaacacctcctgcaactgaggggtggcgctggggatctgactgtaaagctggtggcagcagagacttgcctagactctactagtgacatctgagaggggccctgtgttccagattgagagtgtctggcccaacagagcttcctagtaattgagtagggtctcgttatttgctggtcattttaaacaacaaatagttattgaatttgtactgtgtgctgtgctaggygttgggactaccaataggaataaatacaagtcctttttctcaaaaagtcatttctcaaaaggaaaaaggaggaggacaaacaaaaataattgagcatctgtcatgggtaagcctctgtgatgggtgcttaggatgtacctaatgtcagtgtaaccccaacagtgtccctgtgagataagttctggtacttctcagaggaaattatagattgttgcttaagtaacacataaatgatgtatgagaatttacgcggcattatgctttggagccaggatttcaaccccggcctgactgcagagcttctgtgcttcctctgtgtcacctgagtagtaaattctacactgtgataaataaacttcccagcttatttggagtattataagtattagcaccatttagtaacatatattctagaacctagcactgtccactaacatcattgtcctggaattaacgcagacagtctgtgaatcttctttatggtatttgtttaatttttaacctcagtttccttaacagagaatttggaatactgatctctagaagctcaaattattaaaacataggaagaattatttgtgatatctaatgtgatatctaacatatctaatgtctgttgttgctgcttttggaaaagacagcccagtcttaacagcctttggcaagagagttaagttagctgtagaaataagcactgtcccgtcttagtaaaaactgtaagacatgcttcttcatacgcaaggaaataaaggccgtgttgatcagaaccaggtggtgcgtgaggtttgccaaagctgcatatgttctctcttcttacagagaacaggatgctaagaattstgtgtaagatgagtgcaagtaatgggtgggggcgatcggagggtggaagccgagtgaaggtttgagagaggctgcttccaggtgtttgtaggaaccttcacatagaggccaaattactcataaataactcagagcatcacacttggaaaaggtcctgaagacactaaatatgttcttccctagtctaagaatagactctcttaaattatactaggaagagaatggctgtaattgcagaaatcagaagtttatcccagccgtttttcttatgtggaatcctgtttgctatcaaaataatttgacctgaggttatgagtagttcccttaggaatgaccatttgcttatttaatatacaggccatgttggggccccgatgccgtgcaatttgataaaacttgttgatgtggaagaaatgaattacatggctgccgagggcgagggcgaggtgagtgaaaaccgtcagtcattttccctcgctgccatttcctgtgatcgctggcctttgcgaatgctgtggtatttcccaacagctcaataaagccattgaacttgacttcattggtgatcctggagtctgccaggcttctttctgagggtacatttatgttcagctctcggggagtgggcaggagggacactgatgcctgtcttcctctgccaggcctcatagggatttgggctggagagcctgcaaagaaaggcccggtggcctcagttcctgggacgaaggtcctgcctgttgattgccctgggtacctattagtgagctgctggctgctggatgggaagcctaattacttaaaagtgatttcatcccctgcggggctttccaacagctttgagccagaacctagggcaagcatttgccctacaaatcggccagagctgaggtaattcaggaagggaagtaggggcactggagatcyctcgcagaccctggtggggctctggtaactccctctgcatcctggagtttagggcttccagctaaaggttggggcagacacacacgtacacacatgcacacaccagttttctctggaaaaaccccagtaaatgctgttcactgatgatcttcttttctttaggtgtgtgtgaaagggccaaatgtatttcagggctacttgaaggacccagcgaaaacagcagaagctttggacaaagacggctggttacacacaggggacattggaaaatggttaccagtaagttgccgcctcctcaggtcacaaacagttcagttccactgtggggaagaaaatgtcttatctactgtgcagctgccatgtggcagtggcaccctgaattttctctttcccttcctccttggtgagtggtatgatgtagactgttccatttcctgcaggggacagggttacacttagcatccttggttggattttcactttcacttcagcgaatatgttttgttctgatgcttttttgtttctttgttgtgtttttggggttttttttttttgagacggaatcatgttcttgtcacccaggctggctggagtgcaatggcgtgatctcggctcactgcaacctccacctctcgggttcaagtgattctcctgcctcagcctcccaagtatctaggattacaggtgcccaccaccacacctggctgatttttatatttttagtagagacggggtttcaccatgttggccaggctggtctcaaactcctgacctcaggtgatccacccgcctcagcctcccaaagtgctgggattacaggcgtgagccaccaccgcgcctggcccgttttgatgcttaacatcaattctggttgttgcttctcaaccggaatacaaagagacagtggcttttttacaatatccgtactgagccgtgatgttgaggcctcagttaaataagatctgggggaagttgtggtagacttccagcaatgtaggatgggtaaggatttgggaataaatgtgtttcttaggtttgtcatctcattaaaaatagggtgtttcacagattaggcgaactccttgaatttagttgaatgtagtctcagaaccatttactgtagagaaattctgaagagtctatcttaagagtgagaagcttgtgcaagaagcctgacctgtcctacctgttggtttgaccagtaacctgctgtttcgaagttatkatgatgctgattgcaagccctaaaattacaaatataatttttattactgtgtattggcagattcttgtagattttaggtgcttatttctttggaatttgtattgattagaaaaatacctcccaaaattacttcagattttgcaatacccaaactatttagagctaaattaagtccccctcttccggttcaagagagattaaatgtcagttccaattctactgtggcactcacgaacacatcccatagtctctctggaccttggtttgctccttttgaaaatggagaactggtgtggaacaaaagaaccctagacactttctacagatgacttttggaggcatgagagtggccccggggtggggatggggtaaaagtgggactagggttttgcttacggcactactgggatgtggctggtctggtccagagatgctagagcacttccacagttgactcactcttcccaaagggccaagagcacccctccagacatcgaggaagaaaacaggaatttggcctttgtgtaggaaacatttcttgaactcttactctgtgcagagcactttggaaggaaaagttgtgttcctgctattaaggaacttgagtcacttggtgagccagatgtgtatgcgcctaattcagacaggaggctaaatgagccagcaaagccttgctagtgttgaccagtcagtggtgccaagtggtgacgctgaataagcacgggctctaggaccccttctctgtctctgcacttggccaaatagccttggacaagttcctcagtctctctaagcctttgttttcctctctgtaaaatgggatcataactgacctctgtgggatgttattagaattaatcartagtgtgtattaaatacctttcagtgttgtactgggatccatcctggttggaaaccagccatcagcccattcataaccccctcccctctgatcaacagaatggcaccttgaaaattatcgaccggaaaaagcacatatttaagctggcacaaggagaatacatagcccctgaaaagattgaaaatatctacatgcgaagtgagcctgttgctcaggtgtttgtccacggagaaagcctgcaggtatgtgctttctgggtcttgaatcttgctgcatasacattgccattgcctggtactccaggggctttaaatgtgattggaagtttgagacgcctatcacttggctttcatgtctaatctgctagaatatcattgacctgttactgatttttgttgcttggcatttcctgctcaggaaaatttgttctctttaatttccacatttttattttacttagagaggtctgatgtaccaaggggaggttggataaacatactgggggacaggggcatgggtaatatatgtttccaattatgaaagaaaatattgacatgggttataagaaagtttacaattttcaaacatattaaacccagcctattgatgatatgcttcctaatcatttttgagcaaacggtggttgtgaaccaagaatactcaaagttgaaaatcaaaatcagtattgcagtgaaacatgtatggtatttgccaaaatgttggacagatgatgccaaggaagagaggatctggtttcctgaaaattaaccttttggaaagttgggtcaaatggtatttctagttctagatccctgaggaatcgccacactgacttccacaatggttgaactagtttacagtcccaccaacagtgtaaaagcgttcctatttctccacatcctctccagcacctgttgtttcctgactttttaatgattgccattctaactggtgtgagatggtatctcattgtggttttgatttgcatttctctgatggccagtgatgatgagcattttttcatgtgtcttttggctgcataaatgtcttcttttgagaagtgtctgttcatatcctctacccactttttgatggggttgtttttttcttgtaaatttgtttcagttcattgtagattctggatattagccctttgtcagatgagtaggttgcaaaaattttctccygtyctgtaggttgcctgttcgctctgatggtagtttcttttgctgtgcagaagctgtttagtttaattagatcccatttgtcaattttggcttttgttgccactgcttttgatgttttagacatttgacccagcaatcccattactgggtatatacccaagagatttataaatcatgctgctattaaagacacatgcacacgtatgtttattgcagcactattcacaatagcaaagacttggaaccaacccaaatatacaacaatgatagactggattaagaaaatgtgtcacatatacaccatggaatactatgcagccataaaaaatgatgagttcatgtcctttgcagggacatggatgaagctggaaaccatcattctcagcaaactatcacaaggacaaaaaacaaacactgcatgttgtcactcataggtgggaactgaacaatgagaacacatggacacaggaaggggaacatcacacacgagggcctgttgtggggtggggggagggagggagggatagcattaggagatatacctaatgttaaatgacgagttaacaggtgcagcacaccaacatggcactaacctgcacgttgtgcacatgtaccctaaaacttaaagtataatttaaaaaaaaaagaaaaagttgttagattttaaaattattttaggatattttcttataagagaatgcacttatttttctttgagattgcagctattttcgtttgatctagaatcttctcattcttttgatttttaattttattgttagtagattataaagaatgggatattagagatttttctttaaaaatgaacctatatacattttatttatttattttcttaaagatagggtctcactctgttgtccagctggagtgtaatggcagtcatagctcattacagcttcaaattgctgggttccaggggatcctcctacctcagcctcctgagtagctgggattacaggtgcaagccaccacacccagctgattttcaattttttggtagagatggagtctcactatattgcccagactggtctcgaactcctggcctcaagtgatccccattggcttcccaaagtgctaggattacaagcatgagacaggcttcctttttttccttttttttttaaaagcagttatctgatatccatcaccttgtttacttgaccctgcttttaaaaaaataagtatataaaagtaaatacgaattagagatttgttagattggtattcccagtggttttttaaaaacattaattgcaaaattcctgatgcttaccacattttagagccaggagttcttaatctgggctgagtgaactcctgggggaggggggtagtatgttctgaatagatgagccataactttcatcatattctcccagggggccacaagatggaaaaataaagaaccactattttagagcatttggatcaagctatgtaataactcrtttgtctgtgttaaaggcatttctcattgcaattgtggtaccagatgttgagacattatgttcctgggcccaaaagagaggatttgaagggtcgtttgaggaactgtgcagaaataaggtaaggttctgaagggtccagtctgtcctcatcataacttggcattaaatgtacctgtagatattcagggacctctaacagaggaagtaatttatttttcttacccttttaggatgtcaaaaaagctatcctcgaagatatggtgagacttgggaaggattctggtctgaaaccatttgaacaggtatgaccttcatctgagtgggtgaattcctgtaaaacaaattttccattaagatttttttacaggtagattatataaacatatggggtgacctaaagacatacatgaggaataaataatggagtagtttgacaggggaaaggtttttaaatcaaaagcatttattctcttttcctggatatcagaatatgatcccgaatcctatcctaagaataggatgcctgtcctttgttgagaaggtgcagcttggctgaaatgagaggatggattggatggctggagagtgttgatcccctccaaggcttacgtgcttttgagactggtggcccgtgtcctttttcctcttttaactgccttgtttattggcaggtcaaaggcatcacattgcaccctgaattattttctatcgacaatggccttctgactccaacaatgaaggcgaaaaggccagagctgcggaactatttcaggtcgcagatagatgacctctattccactatcaaggtttagtgtgaagaagaaagctcagaggaaatggcacagttccacaatctcttctcctgctgatggccttcatgttgttaattttgaatacagcaagtgtagggaagraagcgttcgtgtttgacttgtccattcggggttcttctcataggaatgctagaggaaasagaacacygccttacagtcacctcatgttgcagaccatgtttatggtaatacacactttccaaaatgagccttaaaaattgtaaaggggatactataaatgtgctaagttatttgagacttcctcagtttaaaaagtgggttttaaatcttctgtctccctgtttytctaatcaaggggttaggactttgctatctctgagatgtctgctacttgctgcaaattctgcagctgtctgctgctctaaagagtacagtgcactagagggaagtgttccctttaaaaataagaacaactgtcctggctggagaatctcacaagcggaccagagatctttttaaatccctgctactgtcccttctcacaggcattcacagaacccttctgattcgtaagggttacgaaactcatgttcttctccagtcccctgtggtttctgttggagcataaggtttccagtaagcgggagggcagatccaactcagaaccatgcagataaggagcctctggcaaatgggtgctcatcagaacgcgtggattctctttcatggcagaatgctcttggactcggttctccaggcctgattccccgactccatcctttttcaggggttatttaaaaatctgccttagattctatagtgaagacaagcatttcaagaaagagttacctggatcagccatgctcagctgtgacrcctgaataactgtctactttatcttcactgaaccactcactctgtgtaaaggccaacrgatttttaatgtggttttcatatcaaaagatcatgttgggattaacttgcctttttccccaaaaaataaactctcaggcaagcatttctttaaagctattaagggagtatatacttgagtacttattgaaatggacagtaataagcaaatgttcttataatgctacctgatttctatgaaatgtgtttgacaagccaaaattctaggatgtagaaatctggaaagttcatttcctgggattmacttctccagggattttttaaagttaatttgggaaattaacagcagttcactttattgtgagtctttgccacatttgactgaattgagctgtcatttgtacatttaaagcagctgttttggggtctgtgagagtacatgtattatatacaagcacaacagggcttgcactaaagaattgtmattgtaataacactacttggtagcctaacttcatatatgtattcttaattgcacaaaaagtcaataatttgtcaccttggggttttgaatgtttgctttaagtgttggctatttctatgttttataaaccaaaacaaaatttccaaaaacaatgaaggaaaccaaaataaatatttctgcatttcaggtgagtgaggcatcttttttaatgtcatgtttaatattcggaacagcctgtaatgtgcacaagcgaagagcaagaatggccctgggcctggaatccttcccagttgtcttcttttcttcttagtcaccctcctctaactcagctggcctcaggcactgacagacactgacccgagcctcccaccaggttgtctgtggcaaaagtcctaactggttgtggaaaagaaagtcatggtgtgaataacagagaaggtcctgaaaatgcagcttccttgctggaaaatgtatttcaggcgacgctggctgtaactggtgattccgtggtgaatgtaatcccactattgtattttagcactgtttagtcattctcttactgtagaattatttcagatgtctctttatagcagccaactttttcttgtttcttttcttctatctccaccctattccttctgttaccattttaaagattttcttttccacaggtattaatgaatcaaccccctaatttcttccaagcctgttgtgtttaaatctagtttcctgtcttaaattctgtttggtgtgatgatgtgtacatcaagccatgtgcagatgctatcttgtccattcttccacttttatttattaagatccttatcttagcagggggcagtggcgtgcacctgtagtcccagctacatgggaggctgaggcaggaggatcccttgagcccaggagttcgagtccagcctgccccttaaaagaattttttttgagacagagtttcactcttattgcccaggctggagtgcaatggcacgatctcggctccccgcaacctctgcctcccaagttcaagctcttctcctgcctcagcctcccaagtaattgcgattacaggcgcacgccaccatgcccagctaatttttgtatttttagtagagacagggtttcatcatattggtcaggctagtctcgaactcctgacctcaggtgatccgcccgcctcagcctcccaaagtgctgggattacaggcgtgagccactgcacccggcaggaattttttttaatgaagatccttctcatgtcttcagggcttaccttcctccccttctctcctgatgaagtgtgaggttcttaaggcctttcctttctcccctctcccttagcactgaacacagggcttagaaactaatagatattcattaaataaaccttttgaacaaatacttgaaattttgaacaaagctcctcttgcaatgaggttgataataaacactgggctcttttaaaatcatggtgaaattcacataaagttagcaccgtcaccatttttcagtgtacagttccgtggcattcaggacatccacactgctgtgctgtcatcactaccatccagctgcataagctcttcatcttgccaggcaaactctgtacccattaaacaacaaccccccgttctcccctcccgttaaactcctggcagccaccacttattctctgtttctattaaattgactaggtacctcatataagtggaatcatacagtgtttgtccttttgtgactggcttatttcactcagcataatgtccccaaggttcatccatgttgtagcatgtgtcagaaatttccttcctttgcaaggctgaataatattccattgtatgtatcagccacgttttgtttatccactcatccatcgataggcactcactcacactcttcttaccctctggctgttgtgaataatgctgcagtgaacactggtgtacaattctattggagtccctgctttcaattcttttgtgtatatgccctgaagtagaattgctgcatcatatggtaattctatgtttcatttttgtttgaggaaatgccatattgttcgccatatcaactatatcattttacatttccaccaaaaacgcacaagggttccaatttctccacatcatcactaacacttgttttctgttatgttcagaagtagccatcctaatgagtgtgaagtgttgtttcactgtggttttgatttgcctttccctgatgatcagtcatgtcgagcgtcttttcacatgcttgattaccattggtatctcttctttggagaaacgtctattcaaatcctctgcccatttttaaaaagtgagttgcttggggtttttatgttattgagctgtgggagttctctatatattctagatattaatccctaaacactgtttttaattcttaattttcactcccctgcttgggttcagtgcctcttcgacagcactagagatgtgatggtgcttcttccctcaaatcaaaaccacctcaaaagcccagtggtctctctccagccagaacagaaaagaaaaaatatgattgattccaagatggttgtttgcctggctgtgtggcagtcctttcttccgtccaggcccccggcatgctaataccacttatttccgcaacttccctgagagctgaagtccccagcagggcctgagtcaggaggcccaagtggggaagtgagggtctggcaagagccaccctgctgccctcagagctccccagggacccctcccaggccccagctctgccataccctcattttacatctaaactcagaaagcaatctatttttaagtctctttggcatgtggtcattaaatagttttgtcccactccctatttgtagattattggaataattaaaatgtgttgctgcacgccaggaatattttacatagattatccattttatacttacaaacttttgagccacatgccgccattattccagtttacagttgacgaaatggaagtacagcaataatttcatcagcgtcatgcccccagacagaattagagctagccatctgcctccagagactgcactcgaaacctcatgctgtggattgctgttccttcatgtgtgtttttggcactgaacttcctgacaagacctggactgcctggtgccaacaattctgcctccaagcttcagtacaaatggtttcgattccagtctaatgactttgccttgccccagtagaggctaatgccacttcccagagttttattctggttttatgacttagcaaaaatgaaaccccaaatccatcaagaacaaaagcttgacagaaacaccattcaccaggtgtggtggcacacacctgtaatcccagcactttgggaggccgaggcaggaggattgcttgagctcaggaatttgagaccaggctgggcaatacagtgagacctcatctctacagaaaataaaacaattagccaggcatggtggcattcacctgtagtcccagctacttgggaggctgaggtgggtggattccttgagtccaggtggtcaagggtacggtgagctatgatctgccactgcactccagcctgggtgacggaacaacaacatgtctcaaaaaaacaaaacagatactctgtattaggaggaacatatgcatgagtcacagatacgcaggttcatgtgattccccagaacatccacgaatcaccaagcatggcgatagtaatagctataggtattgtggatttgctaacgggcagtatgctatgctgtgctctttatgctctcatttaattctcacaaaacccctgttagacgagtggccggtccataatgatgtatttaccgtcaactaagtgccaggtgctactgtatgctgtggaggtgcagcagtgagtgtggcagacgagatccttgcccttgggaggcttacttcctaatagagagaaggaggcaattgacaagaaaacaaacgaatactgcagattgtgatggatgctttgaagaaagcagttgtattgacagtgcccatttttaagtgttgtggtcagaaaaaggtctctttgaggaagtgatatttggggtgataagccgaagaatgaacagaaagccttgcaaagctctggaggaaacgttttccaacaaaagaagtagtgggtgcaaggccctggggtgggaaagagctcgatctattcaaggaactgaaaggaagccgatgtgtctaaagcatcatgaacaagggaaagagtggactggaaagaagttggtgatgcgggggcaggttaccaggccctgccgccctagacggaatctcagttttccactggggtcaggaggaaagggtttggggcaaggagtgacattccttgaattccccttttgggaacagctgctgagggataagaggagaggcacagagacaggtggagatagtatagtgtgcgagggcagcttgagccaagtaagtggcagtggctggagaaggaatttatttgaaagcagtttggaggtagaaccactgcatgggaggaaccaggagcagagagggcttggggtatgagcatactggggtagatggtggggctgtgcttactgaggcggggaagatgccgaggcatgtgtttaggaggagggaatcaagagcttggactggaagttttcccttgacgttcctgtcagaccaccacttgaagataacacaccagtctgcggctctgactcaggagacagctccagctggagagaacagttcagaaagccatcagctagagaagggatttagagctgtgggaccttatcaggtaacctggggaagctgtgtagaaaggaaatgcagtagaggaggacccaagacagagtcctggggccctctgacaagtgggttaaagaaggagcctgcaagggtgattgagaattacctgccttgcaggaacgagcaaaaaccaagagtgcagtgtccctgcagccaaggcagaaaggcactgcaggaagggcttacggggcacaggttaaggcatatgctgttaaaagcatatgctgttaaaagttgccaggcacggtggctcatgcctataatcccaacactttgagaggccgaggcgggaggattgcttgaggccgggagtttgaggccagcctgggcaaccatagcaagacctctgtctggagaattttttttttaaggtagaataatgtggggatagtccactgcattcagcagtggtggtgaccctgccagtaactgctccagcagaatagggaggacagagcctgctggagcacattgaggaatgaactcccaggaggtcaggacaaagggtaaatagctctattttgctgtgaagaaagtggacatgaatggataactgcagagagatgtggggttgagaggttcgcttttgcttgcaggtagtggtggtttctaagatgggagatactggagtagaatgacatgctggtgggagtgatccagcaaagaaagagaatgatttaggcaagggctagctcgagaggtggggagggttagaactgaacgatagtggcgagactggccattgatagggactcttccattacaacaagagaagacttggcaatgtgggttagatgtcaggtagacccatggtgattggggtggaaagattagggagctatctgaatatttctgtgtctttttttgtttgtttgtttgttttctttgagacagagtctcgctctgccgcccaggctggggtgcagtggcccgatctcggctcactgcaccctccacctcccaggttcaagcgattctccttcctcagcctcctgaatagctgggactacaggcttccaccaccacgcccggctaatttttgtatttttagtagagatggggtttcaccatattggccaggctggtctcgtactcctgaccttgtgatctgcccgcctcagcctcccaaagtgctgggattacaggcatgagccaccgcgcctggccggtacttctgttttttgtttttgtttgtttgtttaagtattacctccttgttacggatgagaaacgacttggagggatcagctattttgtccaagttcagatggctagtaagtggctgagctggattttctgactccaaggcctctgagcgcctggatcacctttttgctgttgcttcccctctgatgcaaagcccaatgccttgagcaccctgagtgcccaatca

SEQ ID NO: 93636 - DNA, 41022 bp, Homo sapiens
gataagtttacaaggagaaaacaaccccattaaacagtgggcaaaggacatgaacagacacttctcaaaagaagacatacatgcgaccaacaaacatttgaaaaaaagctcaacatcactgaccatgaaagaaatgcaaatcaaaaccacaatgagatgccatctcacatcagtcagaatgtctattattaaaaagtcaaaaatattaataacagatggtggtgaggttgtggagaaaaaggaatgcttatacattgttggtgggagtgtaaaatagttcaaccatgtggaatacagtgtggcaattcctcaaaaacctaaagacagaaataccatttgacccagcaatcccattactggttttattcccaaaggaatataagtcattctgttataaagatacatgcacgtatatgttcattgcagcaccgttcacaatagtaaagacatggaatcaacctaaatgcccatcactgatagactggataaagaaaatatggtacatatccatcacagagtactatgcagccataaaaagaacgagatcatgccctttgcaagaacatggatagagctggaggccattatccttagcaaactaatgcagaaacagaaaaacaaataccacatgttctcacttataagtgggagctaaatgatgagaacacatgaacacatagaggggaacaacacacactggggcctatcatagggtggaggatgggaggagggagagaatcaggaaaaataactaatggatactaggcttaataccgggatgataaaataatctgtaaacaaattcccatgacacaagtttatctacataacaaacctgcacacgtacccctgaacttaaaataaatgtatataaaaaaaaggaaggtcacagttcccttatgaaagaaaaattatacatgtatatatatgtagagagagagagaaagaaatatcacagagaataaaagattaaatggatgtattctaaattgtaatcgtgattaattgtaacaatatggattctgaagtaagacagatctaagtctgaataagttaatttgatcagttatttaacccttctgagtctgttttctctgctataaattggagccgaaacaacagcatggggttgtcgtgctaattaaatgagataatacttgcagagtagtacttggcaaacaaaattaaagattgttagtattactctgatttgataaataaggagtactttttcttctttttgtttatttcccatttttgttagatgagactgaatcatttcacttggtaaaaaaaaaaactaactaaaaagaatagtacagaacatttcctgggattattgaccctggagattttgtttaaataagcctccatacagatggacagagccaaaaccacagtgctacagctctaattcagcaaggaaaggctctccttcctttgagaggagttggaaaaacaggtccccctgcacagggaaaactcagaaggaagttccaggaggaagttctcctggtacattgtgaagatacaagaacagagttcatgtgggacatttacttaacaaatgcttggtatcacacagagtgccactgatagctggaaaattaacctgtgttaggccagatctacttcactacaggccattttctacagccaatcgacttcaacagggtagttataatgatatgtcctttatttttggaagtttcattaacattaccattcccaggatgtgatgtgtaagggaagaaaaacttctttcctcattcgttgccaggttcatggctaaggccccatgacaaaaatcaaattaacaagagaaaagcatacaagtttatttaataaatgttttacgtgacacaggagacttcataaataaagatctggagatccaggtaaacctgtgtgtttttatgctaggaagagtggatagttgtgcagaagtatgattagctagagcggctatgagctaatggtaataaacagggagatttagcaaggcttgtttgttcagattcttctgtttttgtgtcttcagagataggctcatttctttcctccaggtacagggagggcacctctggaatgagtgtcttatgacctacttcaggggaaggtcagctacattttatgacctgcttcaagaaagaaggggcaagggtgaacgtgacatactgcttctgccatttccttaaatgctaagattccatattttggggtaatgtgtcccaaaccccatcaattttgcactccaattagtttataggcagtttgccttcaaactaataatttacatttaaaaataaacaactaccataaagtcaagtttacgttcttgtagtcgagtaggacagtaacatgatattcagaaaagcacaaagggggatggtctttcacaaatttcagtaaacataacagtgtcaataaagcttgcaaactaaatgaatccagtgtatctagagaataaagatatttaggtgtaaaaccatcaactgttccagatattgcaagcttgttgagggccaagttagtgtcctatattatttatatttccaaaaacacctggcaaagtattttgcacaagacatacctgggacctgattggttttgttgattactatccaaaatacttgtgttgacatttgcgaggtagtattgccttgcaaatacaggctcaactccataaccacaaggagagcatttgaagcattttaaaaaatagcaatgaggtatctacttttttaacaccgtatggcaaaggaacagtgaacatttgaatgggtattcagcagtgtaaaacgctgacagcaaaactataccttccattgagttggcagctcattcttaagaagatattcatcccggcacaggtatcggacctgaagttaatctcagtgtatccccctcttcctctacaatgcagtttttaactctaactcaggagaatgtttaagtcaggagaattttaaaaaatatcaaaatcagtcttttaaatttcttttaaaaatatgtgcatatttataaaatattctgtataaataataaagtgtggtcatgttttttttttttttggagacggagtctctctttgtcacccaggctggaatgcagtggcgctatctcggctcactgcaagctccgcctccagggttcacgccattctcctgcctcagcctcccaggtagctgggactacaggcgcccgccaccacgcctggctaattttatattttcagtagagacggggtttcatcgtgttagccaggatggtctccatctcctgacctcgtgatccccccgcctcggcctcccaaagtgctgcgattacaggcatgagccaccgcgcctggcccggtcatgttatattttaagtttttataattgaatacttaaaacatacataaaagtagacagaatagtatcatgaatgcccatgtacatatcgccagccccaccaacaacccataggtcatcctgccctgtccacacctttacccattccttacagtcctgtattattttgaaataaatcccagatattatatatttcattcattaatacttaggttaattaggtaattgacctaaaatataaaaactcttttataaataaccatattatcatcatatctgaaaaattaataattccttaattatcaaatatccattatttaaatttataattgtgtcataaatattgtcataaatagatttgctgttttaaagcttgttccttcattttctctgttttgttttagataaacattgtcataaatagatttgttgttttaaagcttgttccttcattttctctgattgttttgttttagattcagaggttacttatgcttgtttgttacatggatgttacatgtgtaatgggggatattggacttctagtgtactcatcacccatatactgaacactgtactcaaaaggtaatttttcaaccctcatccccctccaacctccccccttttggagtctgcagcgtctattatgtccacctgtgtccatgtgtacccatggcttagctgccacttataggtgagaacgtgccgtattccctctccattttgtgtgtgtaatttatttctattgaataaatcaatttgtttgtatttcagattcccctgctggtttgatgattagagaatagttgcacttgtttcctttattctctgttttccctgtgaattggtcattggatataaaggccccattcaattcaggattttttgttttggggttttttggtgggggaaaggcaggatattttcttgctttcattgtgtcagatcctatcattttcagtgcagtttttaaaagctaacttttctattttctcttacctcatccttgcctttgttttgcccacaccttctatctgcaagtaacccatattaaaaacagagtgcataccctttcatatttttctccatattcacataggtatctttacatatgtacacagagtttgctttacaaaaatgaggtcatggaaagccttccaagtcaaatagtagagctcgagtttgttctatttagtggctgcaaaataatattccactgtgcatatgtaccacaatttattcagttatctcactactagtgggcacttgctttgctcccagttctttttgccccatcctgttcatatacacttatatacatttatataggatagaatcctaggagcaggatttttgtctcaaatagtagctttttattttaacagattttttttctggacagctttcaaaaaaggctgtagcaattcacatatccatcagcaaaggataagatcgccctttcccccacaatcttaaatagtctcaaggagccagcaagaatcaggggttctccaaggagaggggaaagtctatgagattccttactcagcaataaatgagctaacagtgaattattcctcaatagaaaggcccctttctattcatctttggatctttttagccaaataggcctcacacagaaccaaagcccagaacaacccaaaacagggtctgaagtccagaacaacccaaaacaaagtccagaacaagccaaacaggatctgaagacagttgtctctaactcactcctccccacttcatgaatccccgtgagttctttcccactggatagtacttgcatattacacaatcagctgcatctagcatctgctcttaatttcatttgatattttatcatctcagttaagattctgggaaaaagaagttgccttctttttgaaagggattgaaagaaactaggaaacttggcaggaagatcattcttaagccaggaaaaaaatttttaatgctcacatgtgaacatgtgatggtcataccagaaggagcacccacctccctccctctgtgacagacacattttcttagccttcacctttccttctttcaagttgctgaaaatccacagtgtttctgttcatttgttactttcattctcacctatcttctctcttgctccatctaccagaacaataattccccatataatacttctcacttcacttttcaacgcaggacctcttgttgggtaagctaaaaggatatgtgctctgtaaataagaaaaatctttattcaaagaatctatcaaatgttcccatgactccatctctatttgtatatctaaagattgcatagtagagaaaaacaaaagattagccctgcttcatcttacagctgggagagtcatgaaaggccaaatgggtaacaaagctcctggttttgaccaagcctagccaaagaagctactcaaatgtcaaaggcattgtttgtataaaaagggaaccaaagtacaggttccctttacagtagaaataagagaactccctgttgacaaagggaggaggaagaaaatataaagtacacttttaaaacatgaagtcttcatagcagcttatagtcgttcagagaaacatgttccactgagaatgacttgagagagaggattacatcattatgccagaaggaagaagccactgtgcatgctctatcaccagcctcaccctcctggtcagccttacaagagtgacactggatatactccagaagttggacccaccacagcctgcacactggagtaagtgctttcctccagttgaagctcatcttagaatgatctgtgacttagaccatccccagaatggtgtagttgcaggaagcctaacgtatgtctcctgagacagcctcagatctgagtttcctccttatgttttggtatttggaaaggggtggagaagatactcttgggtagaagtatgggaggcatacagattcagaagaaaaaggataactctatctttagtgtgttgtctgtggtggcatctagccttaccactgtatacttacattccacctacaaacattaaaataaaatgcacagtgcactcctttgttttaaaaaggaactaggaaaaaactcaaatggcaatttggttccagattttttttttaatgtgatctttgatctgaagtcaatgtaggatgagttctgaacaaagtagcactttcaaaggttgtatattaaagaggtgaaatgaaagacaacttggcacttgagatatgaatttgaatgtgtatatggttacagtctggataagacactgctaacatgacttcattaactgatcgcctatgtgggaccattggacaaggagagggggtgttctggctgtggtgccatatactgaaactgaacccatgagttgggcccacaggaattgagggacaagccagatagatggcaagaattctaatttccaatatgcaaatcagtctaaacatttgactttttttaagtctatttggaaagtttttgaaacacggctgcactaggcgagttcattaagtagcaaaattttaactattgttataactttttctttgcccttttcagttaacactgcatgaccacccaggtgcatgaggctctcttctcctcttagtgacaataacaggctcacaggaagggttcagtattaattatttataccttacttcatgtggctctaagtcaatgtattgtctatgaggttttatatttaagccatacttatgaaatgctaaagaggaaaaagcatatttagcacatttggggcaccctaaatgtgaacctgagtaaatttcagtttgtttgtttgtttgtttttgtttgttttgagacggagtctcacgctgttacccaggctggagggcaatggcgcgatcttggctcacacgcaacttggcctcccagattcaagagattctgtcttagcttaccaagttgctgggattacaggtgcccaccaccatgcctggctaattttttgtatttttagtagagatggggtttcacgatgttggccaggctagtctcaaacttctgacctcaagtgatccgcccgctttggcctcccaaagtgggtttgttgttcttttaaagaaaaaagaccactacttattttaaagggtgatagcagtgtcctgactctacctagacagatatgttcattcatgtgctcattccagttgaaccataataactgcaattttcaaaggaggaatacagagtctgggaaatcagaagagtatagcaacaaactggtatacgaggaaactgaaaatgaaaaatcagcaaagtggtatttgtacctgcctgagtggctacagtggtgaaggtgaagggtggcaggctagattagcaccatctcctcccctcctcgcctgcggcctcagtactttccactgtggtcccaggatacgccaggtcaactgtgatcaactctgacacagacaaactctgggaggggaggaggcatcctttcctattctcagcggtctcagttccagagaccactttagtaagctctccttgtcataccttaaaacataaattaagacccataagtaattccaaaacctcattttattatgttgtttttatctccttgctcgcccatcttaaaaaaaatggtaacaccaatctcagagactgatttctcctacttattctcttaggagggaaggagtgttaaataagccaaggcatgctaacaggaaggaaaaaatggagattatgaagaataatcacaatttgaaaactattaaaaccacgcaccaggcagtttacaaaatatttatttctttgttatattatttctgctgctgaatttggtcaagagrttgtactaatcataaaatgaatgttattgatcattttaaagtctcttctaaaagtagctaaatttatactgctgattccttttgaaacatgcgacctacagcttcttggcttttatgagctattcaagagatatttagtcatcacgttgtgtcacaatgggagtgactcacagagcaaggagagaacctgaggattcctcacacatgtagtactcagagctctacggaaacccaggcacctcgacctcaagaggatcagcctggccagggtggcacaactcttccttccccgtgcacagcaggaaagctgccatcagctgagcaagtccaccaacagtttctgtgtcccacttcatctttaataaggtaactgatgacagttttgtcatttattcttttatttatcaagtcaatctaaactttctttgattttcctcactcttgcagaatgaatcggtggtctttcaagctgtggtcaatgttgctacttcttttaatgtaacacattagaacccagtgatgggagctgggtccatctcaccatagaaatgacctcggtgtgacctgggatcttgccttgaactcctccaggactctctttgaatgtcctttagcaccctagtgtcccaattcaattcatattttattttctctgtgccttcttgacactatctgtgaatcttatgattaattggaaactggagggggaagtctccaaaaagcacaggattcttagatgagtttcttactgaagcagcagattctctgtcaactgcaggtctgatctgtttgtctgtccgctttatcaatattatcagatgtaagtttacatgaatacacacacatattcactaaactgaggggaaaaaatgccttgtaggtcataaaaaagcagggaaattcccaacaattcatatttgatccctggatccaggggtggcagcaataagcctgctttagatatttactccccattttatgatccggtggtttggtttttcaaatgatgatatggctcctttcgcaatgacttgatgtttaggaggtgtgcttcaataaatacattttaaaatcaacaatcaagttagagttgtacaaatggctctgaaatgtcccactacactgttagaccaagggcacagattgtgcttctgtactatttatcctagtatccctcggcatatattaactgctctaaaaatctccttggctacacgctgcatcaaatcaaagttaaatgttataccacctttctattctatttttaatattcaaagagggtgctcagattttagaacaaatttcaatgtttaagtacacacaaaaaaatcattaactcatatatttcaagagtaggaaatgggaactggtgttaaaactcttataacaaatgtcactgtcttaagggacagtgtttaaaaacgcatacctggccgggcgcggtggctcatgcctgtaatcccagcactttgggaggccgaggccggcggatcacaaggtcaggagatcgagaccatcctggctaacacggtgaaacctggtctctactaaaaatacaaaaaattagctaggcgtggcagcgtgcgcctgtagtcccagctacttgggaggctgaggcaggagaatggtgtgaacccgggaggtggagcttgcagtgagctgagatcacgccactgcactccagcctgggcgacagagcgagactccgtctcaaaaaaaaaaaacaacaacaacaaaaaactcagaccttttcttctgctcaaagatcactgtggctgaaatatactgaagttttaaacacacttttggaacctatacatatgttctatgttctaagctttccttaaagccttgtgactacaaatgataactgtacacaacatataatctttcccagatagcaattgttatgcagtgaccataaataaagtaatcatagctttaacaataatttgtaacctgctaatactgtcaggaaacattgtcaaaataataaacctaggagggacttgggataattaatgaatagttagggatgtgatggtgaattataatttaaacgttttgaaggaaggcaaaagaaaatcagagatgcttttatccttagaactaaaaatgcaaaatgtaaatccagcagatcttccctatttgaggcagttggtacacctctgctaggagggagggaagctacatcctgaggaggctgtctgagtgaatctgtagtggaagtacacacgaactccatgcctcrctgtcccagtacccaaagcacagtctggctgccaaggattacctcctgccctcagggaagcaggaatcaagggcaaatgtaactaaccagaggaggagcttcttcatccattgagtaagggaacttaccctcccacgacgataaataccaactcaactatatcatcagcagcataataattattataattgttatttcagtcagactctcaaaaaagcattcgttgcttaatgcaagcacatttaatgtagggtcccttggtgccattaaaaaatttttttttcagatttctgggtggaccatttgaacacatttctcacagaaacataattttttagtttatgtcaataggttccagtgttcatttttttttaagtgtggaagaaatctctaaaagccacctgggttttttttttttttttaaacaaaacaaaacaaaaaccagtttttttttacttcaatgaaaaggaaaaaatgaaaaaggaatgttgtgttaagtcaaccgggtttacaatattcaaatatacaagaggcatacatgttcagtggctttcagtattcagaaagccatgcaagagaactccaaaaagagaatactttagaaaatcattgctcaatgttttctatttgatgtattttggtaaacaacatagttgttgattcaacttgggccacaattgcaacacattggaagtaaataaagattctacaaactcctgacagtgtggttgactagctttggtatcgctttctaaaaggaaacacttcatgaagttatgtggaaataaaatcaactggtctgggaggaactatctagaaagaactctacattgcttataaaaagtatacctcacaataatattgagatattttctgttcttttttttaaactgtgtcatttatttttaagaaacagaggaaggtgaataagagaagtgaaattaaayaatcctattttaacttttttactaggaaaacaaactcaggaagaaaaagaaaagcagaagtgatcaaggagagcgctcgagttgcaatattttcctttggctgctgacaggcagttactataaagcattgtgcatggtgtatgaaagacaaaactagttctcctttcttggtttcttttgaatctttgtgatatggtagagaamgtttgataaagtgttcttgtgcctgctgtcgactgataatgtgttcatctctttgcagttcttccttctctttcacacagtttagagttcagagagttttagttctggtcactctctggcaagtgaccatagttatgacctctactctacaccagaaatatcttgacaattacatgagataaatattacataaacacttcccaaaactttgtaatgttatcaaaattggaagtgtgaatattatgtattattataattgctatcatccttttgccccagcgattcagaggtctcaaagattaatccaattatcactagaactctggagctacagtggagacttccttctttccttccttttttccttctttgctgtacaacatttactaaacatcaacataatgccaagtatcatacaaggaactggtaatgtagagaagtatatgcagagcccagagttgagtgggaatacagactgcagtggtagaacagaatggtctgggtatcagtcccggaattgccactacaactgtagctggagccaattaaacagagcttctgaatgtgtttcctcctctatacagtgaagataattttgtcgtaaggtgtaaataagataaatatttayagatcctaggaaacggcctacaacatgttaggcactcaatgaaccatagcagttattatcattcctccctgacttggtcaaccaggaacttgagaatcatagatttgctaggaggatattttgaattctgtagggtcagttggccacccaccaaagggtacccccagaggagctgggggtcaacagcatggggtaaaccttgagggagggaacagatgggaggtgattggatgaagagatttgggtgaggacacagagccaaaccatatcagcctcttatcctcctgatgacaaaaagacattttaaaatatttatatagagggaaattaatgcttgcagcagcaggatatgagtaatttttataagtaacccaacttttccatgaggccattaaaaaaagaaactcatcaatgtgatactaccaaggaaccaatgactaagtttccagaaaagtagttctagtgctatgatattctggactcccaacactaggaagttctagaacagtggttctaaactgggggatattttgtcctccaggggacatttggcattatctggagacatttttggttttcacaacttggggaggggtgctactgctgactagagagtagaggccagagatgccactaaacatgctaaatgcacaggactgaccccacaacaaataattacctggcccaaaatatcaaaattactcagttagaggaatcaatgcctaaatatgagcaatacatagagcagactgcctcataaagtgaaagtgattcaccctgccatgaagataacaaagttcttactgtaacggcagacattaggtcacttcacccagtactctccaaggtagatgttgtatttctactttacaggtaggaaaatggaggctaagaaaagttaatttgtccgagggccctctgatgatagtgaaactgggatggaacctctgcctgcttgcttctgaggtctgggctcctaactactgctctactgcctcgagccaagagatttacgccctattaagcaatttgttgtgcgataaattggaagacacagcagataagcaaacaactcaagcaaccaggtcagttcctggagtttctgaattgttgggaccaaggggccgtgcagaggtaaccacagctggcgtagtgtggttgaggtagccctattagccttttagttgctgttactaatttatttctcagtggtcaatgaaccaattggccatcaatcagctttgtgtataggtcatgttcccatggctstgacccaggttgctgctcagagttggcatcgtggctaaaatattactagaggtcaaagatatgtgtgtgtttgtggttgatttagtcragtgatctagaggaatctgaaccttagagactgaagaagaaccagcatttctgggcaataatacttgagttaaggagagtgtagcaaaactctaggttagcattggcagtccctrggattcagactgtaggcctaaatgaccctcagtccagagctgtacctaatgaggacaatacattttaatgtgagtccattcttaacagcaaaatttcctctttgcttgtcaccagggaaaaatgggtttgcatagaaaaggtggagattgagggggaagcagaatggacaaggagtaaagagggaatccaactacttagatttgagctttcgttcttctttggtagttgtagaggtgagcttaccaaagcatagatgacaggcaatgtggtatacaagttactacactccaaaagtctggggttcttacttattttgtgcatgacatccaaagtagcctaataaaatcttttcacagaaaaaaaagctttactttcctttgccaaatttttaactttttattctgaaataatttcagaattattgaaaaatttagagactaggacaacccagattcctcaaatattaacactttaccacatctgccttctcattcctctctatatacataggtgcatgtgtggttttaatgtttatttatatacatatcattattattttcttaactgtttgagagtaagttgaagacatgatgctccttactctttaaatacttcagtgtgtatttcctaaaaagcaggccatgttctacatcatcacagtataattatcaaaattgggaaattaatattaatgcaatactatttatcaaattttaagatcttattcaaatttcacttgctggcctaataatgttctttctgaaaaaagaaaaaaaaattttgatccaggatcacatattgcatttggttgttgtatctcgttggtctcctttgatctgaaatggtcctcagtatttcttttacttcatgactttgatgtttttgaagagtacagccatatatttagaagcactggaagatgtttccccatgcataattagctttggatgctccacagaagagctgttgtgtccttccctgtgtgccatctcagggggcatgcgatgttggtttgttccataactagtgatgtgaatccttatcacttggttaaggtggtatccgtcagatttctccactataaaattaccattattctctctttaatttgaaagtatatgacagggagattctttgagattctataatgactgtctgtcatcggaatttgacccactagttttagcatccattgatcattcctgcctgaaaccattgttgctatgtcagttgccaaatggtgatattctaattccatcattcgtctgacacttattagatggcatattaattctaaggaaaaatttccatttatccttatttattgattgatttacttcagaatggattcatgaattcatatctgatttaatgagttattacccattatcactattggctttgatgctcaaattgtctcttacttcgccagtgggagccccttccagctgacatctatgtactagtgatgtatctccagcattcgttgagcacttacttacttgtagcataagatgctccaggcttattttgtacattcgcctccaagctcagccctgatgttagcttttccaaagaacatgaacacaatgtttagaaattggtttctgagcccttggtatgttcattgytgttggagtgtcattgtttctagctcatcgggtagatctagaaagttacctatccatttttgtatttactgactcatattaaaaaccaggagttcatactgattcttccaactataatcccactccacagagttcattccagcctctcctttttcatatttgctactcctccttctgacagtgtgaagcctggcttccatcatccacagcttagttacagttgacccttaaacaacacagggattggggcgccagtgccccattcagtcgaaaattcatgtataacttttgactccctcaaaacttaactcacagcctactgttgaccagaagccttaccaaaaacatagtcaattaacacatattttgtatatgtattatatactgtactcttataaactagagaaaagaaaatattattaagaaaagcataaggaagataaaatatacttactgttttttaagtggaagtggatcatcataatggtcttcacccttaccatcttcatgttgagtaggctgaggaggaaaaaagaagagaggttggtcttattgtttcaggggtggcagaggctgaagaaaataagacataagtggatccaggcagtttggatccaatatgggatccaacagcccacgttgttcagatgtcagctgtgcttattttctcaatcaaataatttgaaatawtagggttgtctgttttctagctctggtggaggcttggattttatgtgattctatttgttcttctctttgaattgtrcatagtttttggagtacgtcctaggaaatttggattgacatgactgtcactactacagctacctcagaagtgagaataacttttttaacacttgaagtgaaatacatagtattacaaaagaaaactactgtattgaaatacatccaaatatttataagtttattttattaacatggtggcaggaacaataaccaccataattttgaagtagtaatcagcattaatcatattttgagataattccaacaaatgcaatgtaacatgaaaatatttattatttctattggtaacaaaatcacaggcaatacaaatactactgcggtttgttgtttcttccgtaattgaagattgtgctaaacttcaattacagttyaggaaaaaaaaaaagatgggatctttttcccatccaaatgtagaaacccctgaattctatccacagactctctcaaagttctaatggcacccttttgtctgagaagctttcatagatgcccaaatcatccatccaactgaattcaatcccttaggggctggtaacccagtttcatgcacaggaacatgcatgaaacataccctccttgtggcttcccttcccccattccctcatctactttcccctctgggaccttgtgtcagttattatactataacagaggaggttatgaggggagatgactctgtagccacaactatttcagatgtcagatgttgcttttggccagtggacttttatccctgcctctcagcaatcatggacaagatgtgaagtgtcgaccttatcaactcagcttgtcagcttggacacttctcagcccagcccagagtggagtgctccagtccccagagcccctcatctgtctcctatagtggaaggacacagcactctagtcccagtgaccttggcaaatcactttgttgctttgagccagtttctaaggcaaataatatgccctctctaactcaaaacgctattgagaggacaaaatgagacctgtgtgtgaaagcacagcatagagtgccttactaatgtatgacattattttactgtgactccctcgtgcatgcccctggtaaaaatgacaacacaaaaacttccaactctctgctctagagaacataaaaccccacaaatatttgtcttcttcaaataattcccctgggagtttagactgcaatgaaagctgcagaatccattcagaaaatatattaaacatttcgcctttcggtgattatttactgaagccagatttgagcaaaacgctatattagttgaatttgtagatacaaaatttccttaaaaggtttaaacatgtaattttgcaagagttagttataccacttcccctcccataattatacatttataatgtatttgagaacgggaaatcttgctacrtggacattgatttgcaacaaattataactcttacacagaaaagagttggaaaaactataccaaattattaagccatggtaatctaaaaagttgactacttcagaaatagctgtagctataccacaagaatcaagtaggttctccaaacatatttttatattcctctgacttaatttttatcaactgacttttttttttttttttttttttttttgkgacagartcttgcactgtcgccagggctggagtgcaatggcatgatctcggctcactacaacctccaccttctgggttcacgattctcctgcctgattctcctgccgattctccagccctagcctcctgagtagctgggattacaggcaccctccaccacacccagctaattttttgtatttttagtagagatggggtttcactatgttggccagactggtctcaaactccagaccttgtgatctgcccccctctgcctcccaaagtgctgggattacaggagtgagccaccaggcccggctgaactgacaattcttttatcattttttttttctttagctatagatcttctgggggaagaaagataaaagcagagcccgaaattttcttgagaagtgaagaagacattacattgattttttttaatctgaaatagtctgtttctcaaacagcagtaaaaatagtgtgtgtgtgtctgtgtgtgtggtgtttaaaattctgtgtgtatgtttatatttcttgatctagaaagaaaactttacaaatacagaagaaaatggggaaaatgcactaaaatattgaatcaagtgttataatcattactatcttctttttttctatgttttttcttgaggataaattacttttacaagcagaaaaaaataaatgatttttgaaaaggattcgaaggaaaaattaggaaataattgtaagaaaataaagtccaggctgggcgtggtggctcacgcctgtaatccccgcactttgggaggccgaggcaggtggatcacctgaggccaggagttcaagacaagcctggccaacatggagaaaccccacctctactaaaaatacaaaaattagccgggtgcctgtaatggtggcaggtgcttgtaatcccagctactcaggaagctgaggcatgaaaatctcttgaacccaggaggtggaggttgcaatgagccgagattgcaccactgcactccagcctgggcgacaacagcgaaattccatctgaaagaaagaaagaaagaaagaragagagagagagagggagggagggagggagggagggggagagagagagagagagagagagagagagagagagagagagagagagagagagagagagagaragaaagaaagaaagaaagaaagaaagaaagaaagaaagaaagaaagaaagaaagaaagaaagaaagaaaataaagtccaaagtctataaactcgcttggcctctcagttcctttttgaactcagtgtccaggaacagccatgattccaaaagcacccacaagttctgaacttcaactcagggcctattgattgtcctctgtgaggcattttaaagcccctctggagtctcagggtgggtcaagattaagggcaaagatattgcgtggacacaggaggaagctttttgggtcatggaggaagaaaataaggtctttcccacatgtggttctctctttagcccctctcccttccacaggctcagagagccaacacagacctgctcctctgtggggagggagctgatgatctcattctcttgggctgccccatcactgagtgtggagggctgggcccatggtactcagacctgaggcagctggccatacagccttggcacccaggcataaacctcaggttcttgttcacttcctctttctggatggcttgcttttctctggcaccagtaccccatggtaagagtaatatatgctgaggggaaacgcagatgcaggcttctgaagaaaaaggaaagaaagccctctacctgcctgattttaggccctaggctacctctagccctgacaaaattaattttccaagtagttctgctgcacatatggtcaaagcttccgttttacagcatacatttgcttggctttatcctttgtccatgtgatttttttctcacaggagactggtgttcacagaagacagaatttggggatgtgggagtctggtttgggacatggtgcattggccagcatttccctctcagtcacttcccatttatcttgccctttcttggtgaactcacttgttgcctcccactttaatactcatctgcattggggtgtaatgatctcagagttgggttgaagattgacattaacccatttaaaataagaaaatggaagccaagttgggaatatcttagtggcaacaaaaaatgctcttcttctcctgacagtttgaagataattgggagtctgacagaacaattaaaattgaattattgtttctaatagattttaagcccattctgcagtggaatttcatgaactagcaagaggtaagattttactgtgagggtctgtcttcctgatagacgagttcaytcctgagattaataccatcactccacatagctccagctggccgtggcaactcaatggcttgtgtcaattttgccatggctcccctctccctctcttccatttaatttctctgaatactccttggttagtttttgcattactttagaggaacgatttatcatttagatggccatcttcccaacaaacaaccaaataagagttattgtttctttaactttctatttatccacactaatgcattaaaatatctcaaattcatcagtcctggrttataatgccttggtagttctaatttgaattttctttttcactttgaacactcaggacaccatcttcttgtattatacaagaaaggagtgtacctatcacacacagggggaaaaatgctcttttgggtgctaggcctcctaatcctctgtggttttctgtggactcgtaaaggaaaactaaagattgaagacatcactgataagtacatttttatcactggatgtgactcrggctttggaaacttggcagccagaacttttgataaaaagggatttcatgtaatcgctgcctgtctgactgaatcaggatcaacagctttaaaggcagaaacctcagagagacttygtactgtgcttctggatgtgaccgacccagagaatgtcaagaggactgcccagtgggtgaagaaccaagttggggagaaaggtgagagacatggaagtgggtaggatgggacagggataggggatagggaggtaaccaaagctaaataaaacrtgctcaagttttaaatggcctttcgagaaaatgtttcctaaataccggctgtgtacttctctaatcttaggatagcttctgagtagttccaagtacaggctgtctgtgtgcatgagaaacacagcccagaagacccttgggcctaagtctcagtgggtgaattcagggctgagatgaaagtattgactttccatggtcttctcctgtaaagggctattctcccctgccccatatacagcaaaggaatttagactaaaatgtacaggagaatatgggggcaattcccaaattgccatctggatacctggcacccacttctccctgcaaaatgattctaaagctcacacattttcaatgggcaaggttgaaaatggcctgagaatttgagtatgagtgtcttacatagttaaggtagagtagtgagcctttggatgtccattctgcaatagattctgctatggtgactgtattctgaactagaagaatttttattggctttgaatgaagtgtgaaacattctcatggattaagatgttaggattcacaaaggaaaaaacaaatgtttgcgattttttttctagcacatcttgatcatgtagctgagactctgaagctcaaaagcaatgatttgataaggcttcgatttttaacacttgaattccaacacctttaaaaatactaaatgtttcccattttaaacaagccaagtgaatgactgaattcttaaccaaaaataaatgtgaagtagattgatatcactctttgtccatacagaacattatataaatattctctggccttactatctagcaaggcaggaaaaatagatcaatttgttctcactcataggtgggaattgaacaatgagaacacatggacacaggaaggggaacatcacacatcggggcctgttgtggggtggggggaggggggagggatagcattaggagatatatctaacgttaaatgacgtgttaatgggagcagcacaccaacatggcacatgtatacatatgtaacaaactgcatgttgtgcacatgtaccctaaaacttaaagtataataagaaaaatagatcaatttactctacatctgagattaaaaagcagaaagactcactcacagagtttcagtatttgacattcagaaccagaaatagagtaacagcgagaacttgaactatttcagtttagcctcccaccctctctgctatcacttcccaaaactgcgaagtatttcagagtaggaaaatgacttcaaggaggaaatggcaccattgtgcaaagcaggggctgtattttcatcaaaggtggcaaataagtactgtcttaccacacctcttttccttcctctctgttctaggtctctggggtctgatcaataatgctggtgttcccggcgtgctggctcccactgactggctgacactagaggactacagagaacctattgaagtgaacctgtttggactcatcagtgtgacactaaatatgcttcctttggtcaagaaagctcaagggagagttattaatgtctccagtgttggaggtcgccttgcaatcgttggagggggctatactccatccaaatatgcagtggaaggtttcaatgacagcttaaggtaaatcaaattaatcaacttattaggaaacaatagctgcaaacgtttactgaatgcttatgtacaagacatcctatttagtacctttcaaaaagtctaccatatttatctctaatttttgtgggtacatagtaggtatatatatttatggttatatgagatattttgatataagtatacaatgcatagtaattacatcaaggtaagtggagtatccatcacctcaagcatttatcctttctttgtgttacaaaaaatccaattatactctttgagttatttttaaatctgtgataaattgttgactgtagtcaccctgttgtgctatcaaatactagatcttattcattccatctagttatatttctatatttctgtaccccctaaccattccctctcacccccactaccctctcaagcatctagtaactatctctctactttctgtctccatgagtttgttttaatttttagctctcacaaataagtgagaacatgggaacttcgtttttctgtgcctggcttgttttacttaacataatgaccaccagttccatccaagttgttgcaaatgacaggatctcattcttttttatggctcaatagtactccattgtatatatatactgcattttccttattcatttttctattgatggacatttaggttgcttccaaattttagctgttgtgaacagtgctacaacgaacatgatagtgtagatatctctttgatatgtttatttcctttcttttgggtatatacccagcagcggtattgctggatcatatggtagctcaatttttagttttttgagaaacctccaaactgttttccatagtggttgtactaatttacattcccaccaatagtgtacgaggattcccttttctcacatcatcatcagcatttgttattgcctgtcttttgtaaatatgccattttaactggggtaaggtaatatttcattgtacttttgatttgcatttttctgatgatcaatgatgttgagcacctttcatatacctattttccacttgtatgtcttttcagaaatatctactcagatcttttgcccattataaattggattattagacttttccccatagagttaagttccttatatattctgatttttaattccttgtcagatgggtagctttcaaatattttctcccattctatgtgttgtcttttcacttttttgattgtttcctttgctgtgcagaagcttttcaaattgatgtaatcccatttgtccatttttgctttagttgcctgtgtttgtggcatattactcaagaaatctttgcccagctaattgtcctggagagttactccaatgttttcttgtagtagtttcagagtttgaggtcttagatttaagtctttaatccattttgatatgatttttgtatatggtaagagattttgtatatgcacaagagattcttctgcatgtggacatccagttttcctagcatcatttattgaaaagactatcctttccccaatacatgttcttgacacctttgtcaaaaacgaatcattgtagatgtatggatttgtttctgggttctctgtcctgttccattggtctatgtgtccatttttataccagtaccatgctgttttgtttactatagctttatagaaaatttgaagtcatgtaatgtgattcctccagttttgtatttgtccagggtgtctttggctactctgggtcttttgtgtttctatataaattttaggattgttttttctatttctgtaaagaatgtcattggtattttgataggaattgcattgaatctgtagattgctattggtattgtgcacattttaataatactgattcttccaatccatgaacatggaatacctttccactttttgtatcctcttcaatttcttttatcaatgttttatagtttttattgcagagagctctcatttctttaagttaactcctaggcattttattttatttttaacttgtaaatggaattaattccttgatttcttttttggattgtttgctgttggcatacagaaattgtttgctgttggcaatagaaatcttttttggattgtttgctgttagctactgatttttgtatgttgattttgtatcctgcaactttactgaatttatttgttctaatagtttttatgtgtgtggagtctttaggtttttccaaatataagatcatatcatctgcaaacaaggataatttgacttcytcctttccaaattgggttggagctccattgtatgttatttgtttttgaggaatctccaaacaaatattgctgcttttaagatcctttctttatacttgacctttgggagcttgattaataaatgccttgtggtagtcttctttgggttaaatctgcttagtgttctataactttcttgtacttggatattggtgtcttcctctaggtttgggaagttctctgttgaatgaactttctaccccatctctctctctctctccctcctctataaagccagtaactcagatttgcccttttgaggctattttttagattctgtagctatgcctcattcttttttttttcttttgtctcctctgactgtgtgttttcaaatagcctgtcttcaagcttactaatttttttattttgcttgatcaattctgctggtaagagactgactcattctttattatgtgaattgcatttttcaaatccaggattcctgcttgattctttttaattatttgtctcgttgtcaaatttatctgataggattctgaattccttctttgtgttatcttgaatttcactgagtttcctcaaaacagctattttgaattctctgtctgaaaggtctcatgtctctgtctcaccaggattggtctcttgtgtcttatttcattcatttggtgaggtcctgtttttctgggtggtcttgatgcttgtggattttttttttttatgtctgtgcattgaagagttaggtatttattgcagtcttcacagtctgggcttgtttgtactcatccttctggggaagtctttccaggtatttgaagggacttggctgttgtgatctaactttttagttcctgaagccatatcttcattagggggcaacccaagcccagtaagaccgtgcctcttgtagrctcatagaggtaccaccttgatggtcttggataagatccagaagaattatctggtttaccaggaaaagactcttgttctcttcccttactttctcccaaacaagtggagcttctgtctatatactgagctgcctagagctggtggaagagtgacacaagcactcctgaccaccatcattgggactgcactgagtcagacccaaggccctctgtaatattgcctggctactgcctatgtttactcaaagccctgaggctctacaattagcaggtggtgaagccagccaataagacttgtgtccttcccttcggggtggcaagttctccctacccttgggtgaggtgtccagagatgccatgtggaagccaggggctggagtcagaaactttaggaatctacctggtaatctattctactgtggttgagccagcatccaaaccacaatacaaagtctttcccacttttccctccccttttcacaagcagaggagtctctcaccatagctactaccacctcaggcctgcgggaagtattgcctggctatgaccaatgtttactcaaagcccaagggctcttcaatcagcttgtggtcaatgttgttagggttgagactctcatttcagggcactgggctcccctctggcccaggataggttgagaaatgccatctaagagccaaggcctggaattggagacgctaagtgcccacttggtgctctaccccactgtagtcaaaccaagctggcacctaagctgcaagacaacatctcctttactcttccgtctccttttctgaagcacaaggagtctccccctatagccatcatagctgggaatgtcctaggtcacacctgaggccagcatgtctctgagtctcacccaaggcccatggtgagtaccttgggtattgctcctgatttttcagggcccaagggctctttagtcagcaggtaatgaattttgctaggactaatttcttcccttcaaggcagtgggtttccttctggctcaggacaagtctagaaatgttgtccaggaggtagggcctggaataggggcctcaggactctacctggtgccctatcctactgtggctaagctgttatccaagtcacaagacaaagtcctctttattctccccttacctctcctcaagcaaagggaaggagtctctccaagagctgtgggctgcgcggtctggggctgggggaggggtagcacaagcactctcctggctgcccaagctggcatcttactaggttgcttgccccccaagtccactgtctccgagcacagcaccaggacttgcccaggaattgcaatccttgtgacctggactgcctttgaagtttatttagaaccccacagcacgttagcccacactgttgaggcttgctggcactcaggttccagctactgaaatgggcaattcctcctccggctagggctggtttgaatgctccctctatgggtgctggctgagttctgcctggtgttgctttccactgtgacagggcagcactgagttccaatgcaaagtcccacaatcactgtgctctccctcccaccccaagtacgcagattctgcctccatgccacagagttgctgctggtctatggaggaggagtagcatcaacaattcaagactgtctttcctaccctcttcagggcctctttcagtgatatgaagttaaagtgatataaagttagggactgtgatcactcatctgatttttggttttatgaaggtttttttgcatgaatagttgtttaatttggtgttcctgtggggaggatgatcaatgaaggcttctatttggccatcctgctccacctctaccctatttagtactttaagttattcccagtgtatagatgatgccactaaaactaaaagagtttaattaatttgcgcaaggtcacccagctggtaagtggcagaactgagatttgaacccaagtttaactcctttttactttttgccttaatacatgatgctcagagtggcagcgaatttatattcaactggtcagtttgtcagatatttagggaatcatatagaaaggctagatcagaataggcttctccattggtttactgtcagttgcagacacaacagtaccaccctatttaaaccttcagtagaaaaccattagttcttaaatagcttctccaagcatgctgtccaagctttatagcttcattccgtgggagagactgggggaagtgtgcttaatccatcttacctggaaccagaacttatcaccatcagttcaaatcccctaaagtacaagtggttctttcagtcaagattctggcaggaaatggtggcacattaaaactgggtaaaaggcagagagtatgcttaaaggacttataaacatgtgtgaggtatctactgaaatctcaaaggatacaatctaggggctaatgacagtaggtgtatttctcttcagaggactgaagggacaaggagacagggcagtttccagaacctggagacgcagaggctgttgttttcagttaagggataaaaataaccagtgttgacaccacaggaggataactactctgaccccctcacctctttcctgatcccccactggcactttcaatagactgaactcaacagaagccagagtatacttagtgcaggtaagattcccaggatatgatgcagacagagggtggaggaaaggactagagaagcaagcggaagatattcagctgagtggtgccacaataggcaagtgagaagacaaagttagttatagtttttcctttgattcatccatttatttatttgactattatttgttgaaggcatatgttagagtttatgatttataccatggacctaggtttagtttactaataaaaggttaaaattactccactgaaattaataaagatagagcaacttcattttgccatttgatcaggttgccaagtttgattctcctaggaaataagcacaaaaatattggaacaattcttccaaaaaactaatgtgcatttgaatcacctggggatcttttcaaaatgcagattttgattaagtggatctggagaggagcctgagaccctgcatttctaacaagctccaggtgctgcccatggttcagggatcacactttgagtagcaaggtcataaaaaaacctccattggtctctttggttgacctttgtttccactctacaaccagcagtatcataataaaattgtagtatatgtaattagagatttactcacttttaaaaaagatttcaactgaagggtttgtgagctttgccatgcaggtatgccatgcctaatagtaatcaataaagagtatttttcttaaatgaatcatggaactagtattttaaatggtgttatgtaggtgcgccacaatccagtgtcagcgtcacaatttctatatataggagggtttaggggcagcagtccatttgagagagggttggggctccttaaaactgtattttcccagcatgcatactgatttaatatggtttttacttacctggtaagcttagttggagggcgtaaggccacttgtccctagtacgttatttttatgagtgggtggggagaaaagtcttcctaaatagcctcttggcactgctacttccacaatctagaggaaattgggcaacaggtgaataaaacaaaagtaagttgggaaataatcttttttaattttagtacaagtcatataccttacagaatatttcaaggtcaagctaacttgcatttttagtaaaatatatttcaaactttacaataataacgttgctagaaagcagaacctaagaaaaaataaattacattttaagtccactaatagagcttttaaaaatcttatggtgaagagttttataaaatgaataaatacttccttatattatatattcctggtaggaaaataaatcaaatttaggaaacgactattcatatactggtttgctgtacaggtggtccctgacttgcaatgttaaacatgacttttcaactttacaatggtgtgaaagtgagatgcatgcattacaaacttttcttagaatttggaattttgatcttttaccagcagcaatatgtacaatactctctcgcgatgctgtgcagtggcagtaaaccccagctccccgtcagccgttgcaatcacagggcaaagaactgctatgctgcagggcactgtgtggccagatgattttgccccattgtgggccaatgtaagtgtcctgaggacgtttaatgtaggctaggctaagccatgatgtttgacaggttaggtatattagatgcattttttgacataggatattttcaacttacaatgagtttatcaggatgtgaccccacaggaacatctgtatattggtttgctttaaagaaaggggcaccatgattcctgtaaaaccttgatgcctagggaatgagtaggcttttagttttctgctgcagcatgatataaaataaaataaaataaaataaaataaaataaaataaaataaaataaaataaaataaaataaaataaaacttgctcaacagcatagggagcaggttagtcacatcagggattatcgtattgtgtccttcagcacatcctcatttgtgctgcaatctccttatgttgctagaatggaggtgaacttgtccatccaggctatcattagttcatttcaccataaggtggtttaagtactgataagaaacctgttcataacctgaatgtccacttagtcaatgatgagagcgtggagaacactctaggaagaacaacagtggactgggggtggtgtccacccagatccctttcctgtcctgccgttaactagtcctcacttcaccactctgaacctcagtttcctcacttgcaaaatgaaagggagagagaataagatatttctttcaaatgcacccaaatctgtgattccatgaaaagattcgtgagaaaatagtcactcaaatagcaaatattttctaaacaaacccggattaaacatcttcaatgggttcttttcacagacgggacatgaaagcttttggtgtgcacgtctcatgcattgaaccaggattgttcaaaacaaacttggcagatccagtaaaggtaattgaaaaaaaactcgccatttgggagcagctgtctccagacatcaaacaacaatatggagaaggttacattgaaaaaagtgagtttccgggcggtgccaatgtcctctagaattctttgtcctgaacagcatgaaggagattcaaatacagatgaaataacaaggttctgagtaataccccaataaggatcttaaccatggatcagggatctcctattaatttcagtgtcatctcttgcttctgtttataaacatttactgagcaattacaaactgccaagttatctgctaagtgtcttatgaattatattatttactcctcaaaaactattagagtaatgagcagaggcttgagaaagtgaaatgtcctgctcaagattacacaacacctcctagtcatgcctggacctgagcccaggaaggcaagtcgagccacggtcttcacctttgccatacctcctcttttcctcaagcaccagctgtacacttggcattaaggatttatggtggttacaaaagatggaaaaggttcagcctctgacctttagtttacaacctagttgacaacaagaagtaaccaagcgagaatgtaaaacaatgaaataatgtagcacacaataaaattaatcctttacttcttaggtgtaatctaacagcccagaaatggtgctagatggtgtggtttctaattccccagggaatttagaccaggaaaagagcatggctggttaagccctaatggggcaggtcaggtttgaataagaggaaaggacaggaaataattacttgggtggaaactttctggagcaggaacacatggaggagaagatggaagacaccaggagccttcctggtcaagagattgagtcagagatgggagaataataataaagatgacataatgacaactaacaaatagtaaatatttactatgtacttgtcaccattctaagtgctttacagggacactcatttaaaatcccccaaaaaactcttattatcgtcttcattttatagaaatagaggcatagagaataacttaccaaaattgtaccaccagtaagtggaagagctagatttggacccaggcagcctgaccgtgccatttatgcttggccatggcactataatgtgaacaaggcattaaggactttggttacactcctgttatcaggctttcccctccgccacaaacttcttgggtcggttaaagtttacttgatattcctcaagtactcactgacctcctgctttgagttgagcagggttccacctaactatgggtagttctttccctccaaactgtgctcaggcctcttaatcagtggacttggtaagactgtcaactgtggcaaggttcatggtcaggagttttcaaggcagagctgaaagccaagtcagacccacctggagaggtttttaaaatgactgactcctccaaccaccattaccctaaacacacacacacgcacacacacacacatgcacacacacagaggtacacacattatctatatatcaactgaaatgtctggtcttacaaacatcttagtgctgacatgccactataggtttagagccactgccatcaaatactctacttttcagttcctgactctgaaggttctatgtaggttccatctaagatggaacttaatacttcagaaacaaaacccctcatttaaaagagctttctctgtttgatattgataccgatactttttaaatgcctttgaatatatcactgacttccatctccaattatttttggcttggttcctggttcatgtgttctgtctcagaaataccaaaaggcattgagctcagttttacactggttgttctcactagagttttcaagtcaggacttggagatcagccaaagtcacggtcccaaagtagaccacaaattgaaggtcatcttttcttaatttcccaagctgggatagtaggagtttaaaatagccactaagacttattaggttctttgaacaacttgtggccagtgggacttgaagttgaaagaaagatctaacatcatagactttcccttgagaagacacagctcaggtatggtttaaaagtatgtgagaatcatatgatagctctactttgaatttgggggggaaatctctatgccattttccataatgactgtactaatttacattctcacaaacagtatacaagaggttttctccatgcccttgtcaatacttgttatcttttgtcttttgatagtagccattctaacaaatgtgaggtgatatctcattttggttttaatttgcatttccctgatgattagtggtgacaaacatttttttcatatacctgttggccatttgtatcttcttttgagaaaagtctgttcagattctcttcccatttttaatcaggttatttcttttcttgctgttgagtttcttatacattttggatattaactgtgcctaagatataaagtttgcaaatattttttcccattctgtatgttttctcttcactctttcaactgtttcctttgctgtgcagaagctttttagttggatacagtcccacttatctagttttgctgttgtttagctttgtgtttttggggtcatatccaaagaaatcattgcccagaccaatgtcaagaagtatttcctttatgttttcttctagtagtttttttttttttttaatagagatgaggtcacactatggtgcccaggatggtcttgaactccctgggatcaagtgatctwcccacctcagcctcccaaagtgctgtaattacaggtgtgagccaccatgccaggcctcttttggcagttttataatttcaggtctatgtttaagtcttcaatccattttaagttgatttttttatatggtgtaagattcagtttcattcttcttcatgtggatatactgttttcccaataccatgtattgaaaagactggggttgtaatccaccactaatcccttgtaaaatccctgcctctctaaaggtatcttcgctcattattcaaacatctcatttgcatgagaactgggatccttttagcttcctgagtcagtacatttggggatgattctctctttatttacagattatagaagcctatacaagtatacaagtgcacaattacatccacacatgcatgcacatacatgcacaagcacatgtgcaacccacattttctctagacacataatcccctaaaacaaattagaaatcaaacatacaactttctaggcttaggggcctcatgggctttatgaagtatcgtttcctcattgctctaaagcactgagggatcaaagtttgatccctggaccagcagcatcagcatcatctggaaatttgttagaaatgctcattcttgggccccacctcatacctcagtcagaaactctggaggtggaaccgagaaacctgggttttaatgagctctctagaagaatctgctgccaacccaatcttgagagctgctggtctaaagaaagcattgcaatatcattttctgaggaatagatagtaaatcctcaaaatgarcctcaattataatggacaattcagaataaatccccttgtatccatcctcccctttgcaccctagacttccactctgctttccccttctaccaaagagtaaatgtacttttgtctctttttaggtctagacaaactgaaaggcaataaatcctrtgtgaacatggacctctctccggtggtagagtgcatggaccacgctctaacaagtctcttccctaagactcattatgccgctggaaaasatgccaaaattttctggatacctctgtctcacatgccagcagctttgcaagactttttaytgttgaaacagaaagcagagctggctaatcccaaggcagtgtgactcagctaaccacaaaygtctcctccaggctatgaaattggccgatttcaagaacacatctccttttcaaccccattccttatctgctccaacctggactcatttagatcgtgcttatttggattgcaaaagggagtcccaccatcgctggtggtatcccagggtccctgctcaagttttctttgaaaaggagggctggaatggtacatcacataggcaagtcctgccctgtatttaggctttgcctgcttgstgtgatgtaagggaaattgaaagacttgcccattcaaaatgatctttaccgtggcctgccccatgcttatggtccccagcatttacagtaacttgtgaatgttaagtatcatctcttatctaaatattaaaagataagtcaaacattttcatgagtggatagacatgttctgttaccttgctgaggatgactctgaaggaccaaagctcagttctgataagctttgaaaaggacaggaaaagggagggtgatcaagcattgtgtgacacgggtataagctaaaggcagcagtaaaacactagatagaactgcaaacagaaggaaagaaaaagataggaaaaggaataagaggactgcaacaaaagaatatatacctaaatatatatatatgaagagagactccccaacactcagacaagccttcctagagggagctatggaggtgaacatcctattcaagcccctaagaacattgatgcacacagttttctggtggaaagatgtaatgacatagtaactaatcattccaaaagaagaataatgttacatttggttggtttattctgatgattgtaaaagtaacaagacccagaccatgtggcacaacttacacctgagatggctggaaatcttgcatttgaagggtctttgaagccccatgaagatatagagctaaataaaaaggctctctttagtctacagttacagtgggattagatctgcatcttgcttatattcatgtttctaaattgaatagaccctgggcccacaccccatccaaaagaaagagttccctaaacagacgtttcccgattccaatagccaatactgctcgcaaaggtttgtagactatttacaagaagaagcctgcagtggcagaatgcaacatgttttgcttaataatatggtgtaaacagccagagagattagctaatgcacatgtgcaagtgtgcacgtgcacacacacacagaggcatatacacacatgcttaacatattgcaaagaaagtctgcctgtaatcccagcaggtcaaggcagaaggatcgcttgagcccaggagttcaaaaccagcttgggcaatatagtgaaatcttgtctctacaaaaactaaagagttagcttggcatggtagtgtacatctgtagtcccagctacttgggagactgaggcagaggatcacttgagccaggaggttgaggctgcattgagctgtgatcatgccactgcactccagcctggaagacggagcaagaccttgtctcaaaaaaagaaaagaaaagaaaagaaaaaatatttaatatctgctgcttgaaaccatgtccgtttgaaggtattagtaattctattcatttttaatcacctttccagaaatatctgcttatgaggtaattttctcctttcaagtttacaacatattggtgagtgaaaaatcaaattacaaatggtgtcaatccacttagatatacatttcataattttgaagaaggatatactcatcatttttgcatcaaaatgaaaaaaaaatcacagcaagaatgagatggaagaattctcgggcaaagttaactaacctgcctgcctgtgaggtcatccccatcttggacctagccccagagacagctcacttgtagatctctggtttcttcttgttgcagttaaccaccccatagtctgttcttggaggtaaagttcaccaatgttgtctgctggggcccctcctcaccttgaattcacatcttggcttcatttcactgctttagaattcttgacaagctgctccctgactttccagacctcccagggctaccaagatgtttagactctgaaggaactttctttgccaagcttctaaccatttcagtcatattcttgggcctacctgattgtgttctttcttttgttttgcctagacctgagttctttgttctttccttccagtagctacaatttggtaactccctgtttcatccaactaaaaaattctctccttaaaacaaatgtcaccaggtgtgatattactccaaaataataccaaatatattcacctaagcaatttttaaaggtttttaaaatacatgagaaggtggggtgttgggggcatagaggcataagtctctacagaggcacaagatgtgtggtagggagaaaggggggacgaggatatcagacagtcactatatcaggcatcttgggcatgggttcctagacttctctctgtcttaccataatcacttctaattctctgttcttttggggaaaatacctatcaaatttttatctgtaaatatttgaagagacatattttgactacgatggacattcttctaagtattggcctataataaggaacatgatggatgtgaggccttccttcctagagccttttggaaataatccaaatctaaggccaatactcaggaagccttagaggaccttctccaggaatgcacggccaagatgaacggagatgttgtcctccaccacatctagcttgaaggattcttcctcacttagtttagagagaccaagagaacctcccaaaccctccctctgacctgatccaaaaatccaagtgtgtccttcatctgggcatccacaatatattcaaatctggagtttttatcttccctgccccacagatgttttcccagtccagcaccaactactgtcaatttaatctccatagggatctggagtctgtctacctttcttcatctccagtgcaatcacctgttcaagctaccctcatctcttgtttctaccacagcatatccaccttgtgcaccatcattgatttctcttcattgtagtcagaattgttcataattaacatctaatcattctactccttctgtcgttgctttcttaaaatcttttcaaagtgttcctgttgcactttggctgaagactaaaatgattatgtgaaccctgctgccaccatactcctcattagcctcattttatagcactgttctcttcacttggccacctctgcagctttcccatgcctctctctggaaagttccatcttacctggttttctagtttctttgtcctacagatctcaaccacgttctcagggaagcctgcacaatttcaaattctgaccaccacctctttatccagttaggttcccatcttgtacactctcactgtgccctgtaattttcttcaggaatctcatcacagtctgtaattgtatatgcatatggttagttaatataggtctcctgtatcatatcataagctccataaaatcatgaataatgatgctttgcttatctttgtatctccttacctaggacatcgctggcacacagatcaatgttcaatacatgtttgttgaatgaacacaaaaattagtctatattagcctttctaactaagggtcaatttattactcaagatcaagctggtcgggtgcagtggctcaggcctgtaatcccaatattttgggggggccaacgcgggagaatcagttccagagcagcctggacaacacagggaggccccatctctacaaaaacaaattaaaaatataaaaattagctgagcatgctggcatgtgcctgtagtcctagctacagtctgaggcaagagggtatcttgagcccaggagactgaggctgcagtgagctatgattgcaccactatagtccagcctgggcaacagagcaaaactctgtccctaaaacatgaaaaataatacgttttttcaaaaagatcaagcttgctgatcccaatagttgtgctgtcagtgtgccagttcagtcaaagtcttataacttccttgagcatttcaggtcttcctgaaggctccccagctctggctctgctctcagccagatactgagcagtgttactgtagtgatttcccaccacctattgcaaaggaggctgcctccatgccaagccatcctgggcccagtaggcacagaactaaaagagcaccagggatcattgagtctatttctctgcttacaggcaggacatgtctaagccatccagcctgaagagaatctcttctagttagaatctctccagaaactctataacttctgttatcttagggtagaccaatacttaatgaccaatatttcaccctgaccaatagttaatgagaaaaatttccaggaaacttctttaaaaaatgatcaattttggctcttctgcacactattaatcccagtagttttcaagaacacaagacatcacagtcccatcaatgtggaggaaaagctaaacattctcaaaatgaaaaacattttttatatttatgacaactcaatctaagccatagtttataaggacaaagctgaccaagagttttgtgagtctttgcaaggtgaaaaataagataatttgatattcctaatgctaacattcttcctcaactctgcaattcatttttcaaaaagaaaatataatttccatcctagtagatgaggtactaatacagccagagctttagtacagattctggtttagtagtatttccaagcatctttctttttttttcttctattttcttttttgcatataacacctgctcaagcaggaaccagatcacagttcttgcctgattagtccctagaaatagcaatccagcctaaaatagttcaggcgagagcaacagagcattctctcattctacaactagcaactctcctgaactgctccattttacttccttttgagaaactggaaacagaaagtattctgctatgaatacatagtttaagttctgggcaaaaaccatctatccccgtatgtagataaaatatttacttactgtgttctgggtctgttttctcctaggtatggcaaccgtaacttgagtataatgccacccaattaatgttgatgcctgaattatgaaccaggtaatccaaacaacctgacttgccatgggcataataggagaaatagtcataatgattgcttaatacttaagtataggtcagattttaaatacactttactgtctattacatgaatgatttcacgtaaccctaatcatatctcacttacgtgtgttttttagagatggagaagtgaaatcacagagagacaagcaacttcctaaggttacactgctagtgagtgtgggccagggttcaagcccaggcagcttgatgttggagccgatgctcagaaccaccatgctgtattattaaaaaggatttgaggccaggcgcggtggctcatgcctgtaatcccagcactttgggaagccaaggtgggtggatcacctgaggtcaggagtttgagaccagcctggccaacatggcaaaactctgtctttattaaaagtacaaaaattagccaggcgtggtgacgggtgcctaaaaaaagaatttgagtcttagacagtatttccctaaactttgattctggttcaacaaaaaacaagactgttattaaattaatctagcattagtcttacctggccaataaccaattatgcataagagtgatgcataattttgagcaatatacaaagatataccccttttagttttcctgtattctattttcaaaattttctcactcatgatgacataataaaggcacttaaacatcattccctagatccttaaagttttctaactagatttctggattttctttctttttttctctttttcaatcttctttcttcttttgttgttatggattttgtccatttgttgttgttagttgtttcaggaatttatttgcaatcactttttgctaatttcaataaaggccttagatcaactgttctgacccaagatcaacactacacatcttccagcttttaagatgagacaaaagaaaaagaacagaagtctggggtcccacacatactatgtttccagatgactgtatttttttcaacaaatagtgggacaaactatgctggtccttgtggctagggccagtcctgggaacactaatgagagaaatgaggggaccttagctggaatgaggtcagggcctcctggcactaccacactgcaatctcaaaaaaaaaaaaaaaaaaaaacagtaagtggctggactttctcatttggctggaagaggtcatatagctcataatctgtctcacagagacacttccactaagaacattcccaagatgacaagtttctgctccaatacc

SEQ ID NO: 93637 - DNA, 39866 bp, Homo sapiens
tcaaccacttctccccaaaaccacacttgtgaaggaggaaacacagagctgaaggatacaccaacccaggccacatcatgttcacgcacatacgtgcacacacgtgcccacgcaggcatgtgacagggcaaggaaggaagaaaatgcatacagttcgcttcaggtgcaaattaaaactgcaaaattatttcttacttgaattacagtattagggtctatttaatcttgttatttttctgcccctttcataccaaacactatgcattttgctgagtttctttcaataatttacagttaactatgtcttacccagcagatatgctgagaggctacctccactcagcacagagaagggggcctagcaaaagatcctgtcagctggcagagctaagtgactggtgagcacataaactggggccctggcacagtgaccccgaaacccagcagagcaaccctcctgtgcaagactgctctctagacagtaggcccagaagtgagcagaggctctgtcacacacacgcttccgagagctgctgggcgcgcctgtgggtcccttcaatacccacactcgactttctcatccatggagaggctgctccaggaggccttctccttctccttcagtgccttctggctggcagacaggtgcttgacatgggccacctccggcaaggggtggtcacgccgatccatataagctgggagcgaaaagtcttcgctcttcacaacactttctgaaaaacacattgaataaatctttgaaaatccatgtaggttgagagtcaccccaaggtgatacttctgaaaaccgaaacacagacatgtgcacgccttgaaaccctggatcatctcagggggtcacagccactgtttaaacagttgcaggagtgtggtggagggggaacagaagcacttctcatcacagccaacaaaaacccaccaggggcaactgctaatgaaccctggggccaaggtgcccagaggcagcacttcctacattaacagttacctgcagggctgggcgcggtggctcacacctgtaatcccagcactttgggaggcccaggcaggcggatcacgaggtcaggagatcgagaccatcctggctaatatggtgaaaccccgtctctactaaaaatacaaaaaattagccgggcgtggtggcacgtgcctatagtcccagttactcggaaggctgaggcaggagaatcgcttgaacgcaggaggcggaggttgcagtgagctgagatcgcaccgctgcactccagcctggtgacagagcgagacttcatctcaaaataaaaaaataaaaataaaaaaaccagttacctgcagacatgggccaaggccctcagggctccctgaacaggtgactggacaaaatgaaagcctatctgcaagggactcaaactaatgaggaagaacaaaaacaataaaaaactcaaaagcgtttcaagttcagaaacaaagacacgtgagaagataaccacgacagcactgttccagggaacctgtgtccaaccaggactaagtgagaaatcgtgctagctcttagaaacgaggatcatggagccattcattcagagcacatttaccaagcaccctctacaggcaaggcagggttctagagatctgggatcatcagtgaagaaatcaaacattcctgcctagcggcacacttctagaagtggaaaacaaacaataaacataacaaatgtgcaaatcacatgtttggaaaaagtactctggagaaagagtagagcaggggggcatcaggaatgtgtggatggcacgaaacaaggggcaacgtccacaggacgaggccgacctaggagcccaaatgcagaggaagcatgcactcaggagtcacagagcacgggcagtatcgtgcgcttctcctttctggaaatcacgtgcacatactcacatacgcgtaacgaaacacacaaaacagacaaggcaagccacaaactgttatacaggtaggaaggaggaagatctgagtgaggatttctgctctatctgcttctgttattttagtgccttcaaagcagcaggtgtcacatggaaaaaagttcagaaatcagaaaggtaaggaatagcttggttgtactgagagtcttcccactgttagaagctgtttctccaattctgtcctacgtctgcaagaactctttgtattacacactggtctggaggtacaatgcccgcaacaatgcttcaactccattagctcagtcccagtgactaaaatcgcccaaatcatgtgaacagtaaatcaacattcagctttaagcaagtcgtatatagacttctctagatgtttctcttagccgtgcaaatgactggcatacttacaaacttatacttgacacctcatcccaaaactgagctgggatttgagggacaggagatggaaatggcctgaattactttctaattttaaaaccctaattctatgaaaatgatgagtgaactataaagaacacttgtatactgaatatttttatcaagttcagcaccccccagaagtttctaaagtttaaaacactcagcttacacatgagagttattaaaaataaatgtaaatatgggtgatgagaatgttctagaactgactgtggtgctaatgacaaaactcaatgaatatactaaaaaccactggaggatacactttaaatgggtgactgttatatgaattacatcttgtaaagctgttgtaaatgccatgacagggagactggggggaaaaagctattataacgacataaaccctcaaaaccttggtgcatgcaaacctcaaaattgcatcttccagaataagaatggccaattcatggtttcaggggttcttcagagcttcaggcctggtcccccagcaattaagggaaaatcaatggttaatataccaaacatttcttttagagagagagaaaaacaaagactccagattgtaaggaatgtttgtcaccgcttcaacatggaccgatttctgttgagcctctgctggggagatctggtgtatctgggcaccccttactcaggtgcatcaccacacaaatatcccaactgacttcagtgacggctgatggtattccagactgctttaatatcttgagaacagattcatgtattattcatgtatgacttacgtaagttaaaacttaacagagaagacttgtctaagagtctgcagttcgtcttcatctgcctcctatgtgctggagatacggcaatgagtaagacaggcaggctccctggcctcaaaaggcttacactctaagaggctgagacagcaatactcaaatagacatgcattcatgaggcatccagtgttataaggaaaagcacagcaaggtgaggtgacagggagcttcctgagaaaggatggtcaggagaggccgttctaaaagcacatttgtatcgagggtgaatgattagacaggagcgaccatccacaactcggggctctacgggaggaatggagtaaggccagggggctggggcagtgagcaagtggggatgggtggttctgatggtagtttttgggttttgagtacaacagtcagtaataagatcggaaaggcaggcaagaccagctctaaccaggcagggtgtagactctactaaggcaatgaaaagaccctggagagtttcctccagaagccttccctgaaacccacatcgggctaaatgcttctacccaggagccatctcttaataaaacactgtcttcacccatccgtccctcttcagattgcaaacagcctcctggaaagtgtgtgtatttcatattctttttcttctcggtgcctaacagtgtctggtacaaagtagatagacgccagatacatgcaaaagtaaatgtgctgtatgccagacacagaactaagctctgtccatatacttcaggtgagcaaagagattcctgagcttcagtagctagtccttgatagaaatgagatgaaaacccagctcaggctaggaagtccaggctctttcgtttccattgcctctataatgtaaacagaggtgatgcaaatggttgggagttgtgggggcaaggtggggagggaggtcattaaggtcagtcagttatggtgcagaagatcttttgaaaggggtagatctcgaagcttaaaaaagtggaacggaagggaagggtaagtggggaagtatcagtataaccaaagatccagaagagattcaatttgacttataaacacttcttaatctagaaccaagccctgtgagaacatttatatctcccctaaagaccctcaagagccgaattaaggtctttaaaactccagcacagggctttatacacagcaggagcaaaatgaaattagttcagcctatttaaaagtaagaaaagtcacacttaccatgagctcgtacacacacagaggtggaaattgctcgcttgccaactaggctaaataccctggtagccaacattctgaaagataaaaatgtacaccttctctatgaataaggacaaacagcaaggaattagtcttctttttgccccagagcattttggaatttttttgtttgcttctccccaacgcaaatgatccattctttatcactgtctctgaattcacaaaatgacctaggatgaggtttttcttagtaattggcatgcttttaaggagcttcattataaatcaactgccataatatatacgcgcttcaggtaattaacagaacattggtctttttaaaaaaacaaggagaggccgggcgcggtggctcacgccggtaattccagcactttgggaggccgaggcggacagatcacctgaggtcaggggttcaagaccagcctggccaacatggtgaaatcccgtctctactaacaatacaaaaattagccgggcatggtagtgggcgcccgtaatccccgctacttgggaggctgaggtagaagaatcgcttgaacccgggaggtagagactgcagtgagccgagaccgcaccactgcaccccagcctgggcaaccagagcaagagtccgtctcaaacaaaaaaaggcaagaagaaaaaatgctaacaaggtgactctgaaaaagctagagatcattaaagcactgtgctgccgtgacagactccattcttcagggagcggtggggggaggtgacagctcacagggaccgtggcacgcatcacattcaactgagtgtttaaaacctaataccgcctgtacatagactagaaggggaaattggagaaggctgccaacacagccccgatcaatttccaatccctgaggagagcggaaaacctatgagaccccccctcacccgggccctcctctattcaggcccatcaaccttacacggccccctttaaatcgacccttcggaggactggtgagagtgatgtggggaaataccctccttggggcagaataaacaagcatgacgtcagggctgaacgcccgcgtctagcttctctccttgggcctagcccttgcgtgagcaaacaataggcgccttccaggctggaaagccgagcgccgcccgggagccccgcaaaacccgggaggggttgcacagggaccttttgaaggagcaagggcggaggctgcaggcacagagcgcgggcccgcctccccgcagcctgagccctcggccagcgggcgctccaaggtcagtgcccgaggccggtccgcagccgctgcgagaccgggtaagatggaccgggcacttcggggcggccccccgagcctggagccaccgagcccggagtccccacgggccggcctcaatgtcacctggctccgaggcccattcggtgcttcctgctgaagccgagcggccaggctgcggacgtgcagacttgatggctcccggccccccgacccggcccggcctggcggcgccgcaccggccacctcctgtctcacctgccgccactgcccgccgcgaccgccctctacacccggtgtcccgcgaccggaagagagcaaggccgcgccgcggagcaccacgggatcgaggaagactccgcccgcacccggccgcamggaggtcaccgtggagcggaaaagggtagcgctgcgaacgtcgtaaaatgccgggccgggctgctttccggcaggcgttggagaggctgctttccggcggcgccgggcgagaagcgcgactggagtctggggctgcggcttcccagaggcgcgagtcgcttttccaggagccgaggcccaaacggggccgggcctgaagggtcccmcgccagcccgcggccgcgccatcaatcgccgccgcctcgtcccgcttctcggctgaggcgccgcgcggccaggcagcgggtccaggcctcagccgcgcgcccaggggcctccggggccctcccgggtcagcatgcccggggtgaaactgaccacccaggcctactgcaagatggtgctgcacggcgccaagtacccgcactgcgccgtcaacgggctcctggtggccgagaagcagaagccrcgtaaggagcacctccccctgggcggccccggcgcccaccacaccctcttcgtggactgcatccccctcttccacggcaccctggccctcgcccccatgctggaggtggctctcaccctggtaagcgcggaaagggccccttccccttgcaggcagcctggcctcccctcagtcagcagagaggaagctggcccagcggtcgccctccagcaggctcctaggacccgctccctagggttgccgtggccaggaatggggtgatccacgatggcgcttgggtcttggcgctgaataaatagcgtcccgtagtagcagcgactttaaccgtcgtggatgcttttagaggcactttaaggcgacgagttatacgttagtttcctgaaatcagtagcctttgtagaaacaagtcatcgttcacttggtggggattcgacagagtttcccttgaggatttcgagttgcaggaagtgttcacgttgttgggacattaatcgctagsatttggttcttcgcaccttcgcagagccgattccttatctggcaaagtgtaaatgcttctttggctgtcggtactcgggcaccccggagctcasacacttgtagaaaggtagttgcatggtcagatctgtgtgatgcatcttaggcctggctccccttgattgaatgtgcctgagctttgtgtaaagagaatttgttcccgttaatggttaacaacttatctagaatgtttccatggcttttaaaagctaaagaatttctgtggggccgggcgcggtggctgacccctgtaatcctagcactttgggaggccgaggcaggcggatcacctgaggtcagaagtttgagaccagcctgaccaacatggtgaaamcccttctctactaaaaatacaaaacttagccgggcgtggtggcgggcgcctgtcatcccagccactcgggaggctgaggcaagagaatcgcttgaacccaggaggcagaggttgcagtgagccgagatcacgccactgcactccagcctgggtgacagagcaagactccgtctcaaaaaaaaaaaaaaaaaaaaaaaaacgaatttctgtgacattaaacagcaggagcagacgatctgtccaacacgcttttatgtttttgtttgcaatgacagctttattgaagtacagtgggaaaaaagatgtagcatgcaggtagactagttggtaagtgaattttaggcagtagcttttcagttccggtgatcaatgaagggaaaaagaccatctataaattccatcgagttgttaaaacctgaaggaaaagtaaactgtagcttcagacctgcatacctgagctgaggtgctgtttgtttttcatttaagaataaactgtgatgctaaaaaatagtagctaattgatgtaagaagtagctaagcttgagaaggtgtaagtagaatttctttatctgtgtccctcctccaccaagtaaaacgaagccatttcataatctaccatttataacttaactaattatgacacccaagtcagttctgggcaagcaagaagtatctctgggcaaagagtcctggcgtaaggttcctgggcacatctttgagtgcctgttaaagttaaacttcatatcatttccgggtaggattcagatgattataatacttagatgatatttataaaactaagtattttagctcttgaagatatctgctgtcattactgaaacaccactggggagtgtgtgtgtgtgttttaatccaggtctttccaaccatctttttgtttttttgagatggagtttcgctcttgtcacccagcctggagtgcaatggcatgatctcggctcactgcaacttccacctcccagattcaggtgattcttctgcttcagcctcccaggtagctgggatttcaggcgyccaccaccacacccagctaatttttgtatttttagtagagatggggtttcactgtgttgaccaggctggtcttgaactccttacctcaagtaatacggccacctccgcatcccaaagtgctgggattccaggcatgagccactgcgctcagcctttccaaccatcttaattgttctgttgtcaagagaattattggatctgtgaaatgcattgacttgcagggagctagattcatcagtagcatttatgcgggattattcacttttctaataaatgtttttgagtatctgctttgtgccaggcccgtgctgaggagggatatggctgtggatgaaacacagtacctgcttagcacttgaaggtgcagcaagccagcaagcacagcacctaaacctcacaggcggagcttagtaaaaaagtggcaagggattcgagagaagtcagccagcctaggcttgggcaatcagggcagtcaggttgcccagagaaaggaacatgcaggcagcgggccagcctttgaccctcaggaggtgggggatggagggagaacattcaagggaccagcatgtgcaaagagcaggagaaaatagtgggcgggagaggagagcgagtgggggagtttggagagagcaataggatggagtgtaaaggggcagcgggcagagagagttgagtggtggacagattgctttgtagtgaccttgtagatcatgcagaggcatttgggcaccatcctgaggacagagggaagccactggaggagagttgcgtgatcagatcagtgccttcgagtgatggccccagcctgcagcagaaaggatgctggagacaggagtacacccaagactagaggcagggaggtggcaaaactgagtgcagcatgggtacggagaaggggacagaagagagagcaggtgggagaatccacaggtcttggtgactaatcgtgcatggacctaggggaaaaggaagtaagggtgttacctaggttcctggcttgtgcgctgggacgatggtgcactggtgccatttgttgagggaagaggcagagaaacaggtctggaggggaggtgattacttctgtttggggtatgttaagtttgagatgttcaaatgaagaagtcctaggttgaaaggtgaagaatgggtctgagtacagagaccagagatggatgtagattgagaaccagtggtgtgccggtgacttctgaagccatgagagcaggtcttagcacttgaggactgcgtagggaaaagctctccaaccgcgtgtgtcctctgctctcaccgccaacagtcaacacagaagaagacttgtgtgaccggatgtataggagtttccccacacaccaagcagcggccaccagctaggtgtctccgcattctgttctgacactgcctacctggagatagtgtcagagcccacgggttgagggctcagcagcaagtccaggctctggaacctctgacccaccagcttcaaggtggggtttccatggcttcctgtttggatttgattaatttgctggagcaactcacagagctcagggaaaaccttatgtttatgggtttattatacaggacactgcaaaggatacagatgaagagacacatagggcgaggtatgggaaaggggcatggaagctccccgtcctcttgggtttttatgggagcttcatgacatcagcattccttcccccgaggtctaggggggaccctctcctggagggtcttaagacccaccgtcagaaaggcggagagggaacagtggagtggaaggagggcaggagaaggtggggtcctagcgcccctgaggctcacgcacctggcattctatcaaaagactaaccagggccgtgaggagccaggaacggggaggaaaaccagtgtctctcatcacaccccaggaacgtggcttggggcactctggcttttatgggttgagtggaggaggagtcacagagcaactgaggaccagcccaggagtgggagaagaaggtgtggtggctgctggccatgtaaaatcctgtcagaaacttctaggagcttcttgaagacaaacttgaacctcatttggaatgtcagatgttgcttattcttctcattcttaagtaaccttgacagagttaaacacttctgttccgactatgggatgtgaatgcagtacttgacagagttaaacacttctgttccgactatgggatatgaatgcagtacttgacagagttaaacccaggaactataaacaactgcattcaagtcacctgtacatgaattttccacgggggagcagggctgcctcccaaaccacttaccagggasgaaagatgcccagaggggacagtgactgcctgctacctgagcgtgagagggcaccgggcaccgcaggggcccactctgaccttgctcccgcgcctcattsctagttacagtctgcactgtagacatccagcctccagcacctccccccaccacatgagtccccatccagcaagtaaggtccacacttgactccctgcggtaactactcttcagcagtgaaaacaagcagcaagttttgccaggcaatagttatttatactgacttttccgagatggagtctcactctgtcacccaggctggagtgcagtggagcgatgtcggctcgctgcaacctyggcctctcaggttcaagcgattctcccgcctcagcctcccaagtagctggtactaccagcgcacaccgccacgcacggctgatttcttttttattttagtagacaaggtttcaccgtgtcacccaggcgggtcycgatctcctgagctcaggcagtccgctcgcctcgccctcccaaagtgctaggattacagacgtgagtcaccgcactcagccctgacttttctcatattcacaaaaactcattccctcagcagtgggcaaatatgaaaaagacagcaatccagtgcccatgaaataactttcagaggaaagttacaggggaaaatttgcagctggagtccatccacaaattttgtacttcagttaagctattaaatttatattattcactttttgacttagtgacttcctaacctgaaggcaatgaaaactctcagtgtttagagccatagtttatgaggttatcagccatagaagatgcagttttcacaaagcatctaaatccatgcagctgtgtaaatgaggccttgttctcatggctctgttccattcagagagcttcctattggaattgtttttgataaaggggaaagaccatagactgtctatcaaaggacaacattagattcctttgaaaggcttttcattattttccattaaaaaaatccttgcatttgtgcatgctttttgcatgctttttatgtttttttaagtacttacgcctattaacttatttatccttataamcctttgacgtaggtagtgaaggaattattcctaatagcagaaacccataaaatgttagtatggaaattagcttgaacccgcttctctaatccctttctgcccttttccccttgttgatttctagtgcggtggagtagctttctgttacattctgcgcagatgacttgctggcttgctcactggcctcatcaccatgatttcaggctagarttcttgctgtggcctccatgtgggcctgtcctctgctcctctgcacggcggctgccctggagctctcccatgcccctactccctcctgccctttgttcatctccagaacattcacgtgccaccttggggatggggagagggatgctgtggttccccctttgagttcttcyccctgaacttcaccctctrtctcggtcccattgacctcccaagctcttctttcatggttcccactccttctcattccatagaaagatcagcagctgacttgagaaggaactttccttctcagtgaaaataacagttgctctacttctgaactccaaggcctactttttgctgcagataggaaggctcagcaggttaccctcatcttgttggtaagtggcaagttgyggtccctgcctcgccttctttacggttattgtacagtcacaaggggcgtggggggatagtgcagattttagcaaggctgctgtgagaagctactgcctctgtgcaaagagtctagttgggaatgaaaggggtggccccagcccttttaatagttctcttccatgtctggaacagaagcagccaaaaaggacattgagcagagggtggtagactcctgccaaggtgaaaatgtcctttctctctaaaaagtaaatgaaattgcatgagtaagtgcagaatgcggaaggtgtctatatcagagtcagtttgactacattgacaacagtctccacagagttttctcctgaccttttattttcatcttgatttttcacaagatgcacatcagggtgtggggtgtcgtacagcgaagcagggacatggaaatggattcattgggaacagaggttgagtggcttctcggctgtgccttgtcttgcctcgcttcggaggaagctagttgccttgactcctagctgccacttagatccaccgcagcttttcatgcaggagccatttgggctgagggcaggatcctgcagccactggagacctggctgccacacccacacctacaccaccagcaagccccatcctcttcccccagcccactccactccagggcactctcacctgatgcctagttccagattccggactgtcacaggaaactacccttattagaactcatccaccctgccgctgtgagtgctgaggctyggccgagtctccgttcctcccttcgagttctccattcctcagttggtgaacgggctgtgtgcacccctcatagccatccatacagctaacttggttattctcatgtgtgtcattcaaaagttctaaattctaaagccaggccagagcttttgtgacctggttygctttaagggcaacctcttcaaagaggttctacttaaagttccaggtcatgacatttttctgctggaatttggttgggcccttggagttttcttacaggaatttgtccctcagcaggcaaaatgtaagttgagatatacatgtgtttgtcataggaatcatcttttgtacsaggtggtttctgtgctctgagagtgggtacaaggtgataccatatgtgtttactgggctatgagtcctaaccaggtggcttcagcccaggaaagagatggagtagccaactgagactgctgctgggggtcttcaggaagttgcctgtagctaagtaaaaaatatgtcctatggtttttcctagaaaatgttgtatggtatggtcagctgagtaataaccccccaaatatgtccacatcctaatccccaggmcttatgtagcaaaagggatttgtagatgtgattaagttaagggcttgagggtggagagaatatcctggattacctgggtgtgcctcatgtaatcacaaagacctttgtaaaggggaggcaggaaggtcagagtgagaggaagagatggatgatggaagcagaggtcagagtgatgtggccatgagccaaggaatgcgggcagcctctaggtgctggaaaaggcaaggaaaaggattctcctctagagcatcctgaagaagcacagctctgctgacccattatagacttctgaccagtaagataaaaaattttggctggcatcatcctcagcaaactaacacagcaacagaaaaccaaacaccgcatgttgtcataagtgggagttgaatagtgagaacacatggacacagggaggggaacatcacacaccagcgcctgtcagagccggggagcgaggggagggagagcatcaggacaaatagctaatgcatgcggggcttaaaacstaggtgacgggttggtaggtgcagcaaaccagcatgrcacatggatacctatgtaacaaacctgcatattctgcacatgtatcccagaacttaaataaaaattaaaaaataaaacatgcactttaatcaagtacggtttatttcagaaatggaagaaattagggaatttgaagttagaaaatccaaaaaatgtatgcattaaaaattctaagaaaaacaatcatatgataatctctatggatggtgaaaaatccttcaataaaatttatttcttgccttaaaaaaaaaaaattgggcatggtggcttgtgcctgtaatctcagcactttgggaggccaaggcaggaggattgcttgaacccaggagtccaagatcagcctgggcaacatgatgaaacctttgtctctacaaaaaatttaaaaattagccagacaggatggcgcacacctgtagtcccagctactcaggaggctgaggtgggaggatcacttgagcccaggagttcaaggctgcagtgaactgtgatctcaccactgctctccagcccggacaacggagcgagactctcaaaaaaaaaaagtgttgttttaagccactaagtatgtgtaacttgtcacaagggcaataggaaactaagacagtggccaatctgactgtgaaaataagggcaggctacactggagagcagggatagggacacccggggggcagagatgtgggtcaccttaggggaggacacactcaggaggccggcccatgatggcacatgaaggctgggagcacggtgctcaaggatcagctcatcagggaacttgaccaaatttagagcaagsccctttgatagtgtatagagatgtttgttctaagcagcaatagaaagcttctggaatctgttccattaagaggtgatagaaacaaaatatgagtcgttttggagttgttttcagcaragtcacaatgatagcaccattatagatattttacagacataatcctgatcttttgggtggatgaccagaatgtctagttggttcactgagccctggttttgacccaatatggtaattcgtgaactcttaggaggccagaaatatcctaatcctgtgcaaggcagggacccttggactgtaactgtcttgtctgcttttggtcgtgaaggagactcagaggcccaaacaagaatttaggaaaaagagcaataggattgtgtttaaaaaacacacacatccatttttaaccagtttattccctacaaaaaaaaaaaaatcaaggtaccaattttgtttcctcttgtgcagactgagaatagactttattacagtgtattcaaattccattatgccaaaacaggatgagcttttgttgttttgaataatggccttagacctgcaggaagctgcatctggtgagaaacatggtaccataaaagaaacccaaaaacttcaaaggtctgccaccttgcttccatttcaaagcacgccggagagaactaaggacatgtgcacgtgccccttcctaacttgggacctctttaccctacaccccaactgaggggtatttcatgatgcggtgcttagaatgctgagatggagtataaaagacttttttttttttttttgagacggagacggagtttcactcttgtcacccaggctggagtgcagtggcatgatcttggctcactgcaacctccccctctggggttcaagtgattctcctgcctcagcctcccgagtagctgggatgacaagcgcccaccaccacgcccagctaatttttgtatttttagtagagatggggtttctccacattggccaggcttgtctcgaactcttgacctcaggtgatccgcccacctcagcctcccaaagtgctgggattacaggtgtgagccactgtgcctggcctaaaagacttgttttgaaagagactgagattcccttctggctctgtttctatctggttgtgcaaacttagaacctctctaagctttgtttccttaactatgaaggataatgatttaaataattttaagcatttctaaagccccagttctttatagtataagagaaggtaggtgaaggtcatcttccctctgactctctgcagcactgtaccaatccagtacctgtagacaaagggtcttctcgctgggactgaggaagatagtcattccttatgttcaaagtcctgcccttcctgaccattttttcctgagtcctaccctttcttctggggtgtagggtatgaggattaagattctgtcatgtcttgtcccagcatgtggcagtgagatctgtggtttttacracttgatatttaagggagagtcattcatcttttcccaatttttgttcctctttcagattgattcatggtgcaaagatcatagctacgtgattgctggttattatcaagctaatgagcgagtaaaggatgccaggtacgtggatgcagaaccstctgtgggcgaggaagtgagcacgtgttgggcagaccccgtctctcgtgtgcttttcggccagatacgaaacctgtgagacctacaccccttccctctgtgcttatttgtagtatttgaggcgaactgtggtgtggataattccaaacaacagaaattccaaacatttctattaactttggaattctgttttgtgtcttctttattttgcatgaagggaattcatacaatgaaagcgacagttggcttccgacttctgtccctgctcagctctgccttgcttccccttcccagactaggggtggtgttgggcagagcactgggaaggaatgttgctctatttgccggtaaatagaccagcctgtaggtttggggtcagtactctgatgaaaatgtggtatttgctgccccctttatactggctccttctttcttttcctttatccagatccttccccaactggggctctcgctaataacaaagctgagaatttttctatatgtctgcgtcatcttggtcccaacagaaaaacagatgacacactcaggtggtgataatctgaggagggcttaataagcaggctgttsacaaggcctgggccgtagataacgcacagggggtcgtgcwgtaaacaaggctggcgacaacagcccaaagggtggggaggaaggagctgggtaaacaagtccaccttgagaaaagcagtgcccttgggcaggtggccacagccagcctgacgtggcctcccattaggggagaggtggcccagagcagtcagtacatgatgtcccccttccattttcctttggctgaaccgagccagaagccagatgggcagctggaaagtccacgccgtatataacgggcatgcgtcaggctgccctgacgtggcttcctcatgttgtcagatagagccgaccctccagtgtccagggagatgggggtgcagtgaagggccctgccgttgggtccacytgctcagcacagatgagaaggtgagctcaagcactttggaaataatacagtaagctggtgacagcattgctatcactgatgaggcaccagtgtttctgatgagaaacatggtatcctaaaagaaacccaaatttagaaacataattatcttaccctaggagggctgggtccaggcacaggatcctgagggaggcagatgtcctaggagatgctgcactcaaagtcagtccgctgaagcctctgccaaggcggttgggagtgcgtggaatccccatgcacrttggctcttctgctgcttcctctgagcccacgagcagcactggcctctccgccttcagcgcatctcttctgactctcactgggatgtcctctgtttgatatcgcctgcctccctttgttgatgaatcagtgcctcccctctcagtgccttcactgagcgagagcctacccacggggccacatccatcttagtctttgttacatgaaagactaggcgtgggctgaggaaagcgcagccctctggcccttgccctcacgtggctgagttgaacatgaaggacagtgcaaacacaggctgtggtgcaggacagcggcccctgcagggggcttggtggcaggggccgggagacttagacctggtaggatgatcccagaagtccagggcatggtgtcctgtaaaccaggccctcgagagtgagcagggccttgtcaagtgcagacgtggagaccaggaggtcagcattcctggttggggggacagcagacacaggtgaggacgtggcaagggctggggccgtgcccacatggagggagatgctaggaagtgaggctgcacaggtaggttgggccacagctgagggctcctctgtgctcagaagcattttgaacttcaccttgcaagcagtggggagcacccttggcaggaaggtgttcctggaccaagcagtgtctgccgtggctgtccctgcagaagggagaggagactgggcaagtgggaatggcaccaggttgtcagatgagggcaggggcctccctttccttaatcccccacctgcaaatccatgcctgatgtggtcgccccacatggacctgcgcaggctctcctatgctcctctctgcgcatgcctcatctggctcacagctctcatgttcttacctctgtgctgacctcgttacagcccagcctggaattatcctactcggacacagttttcctgctctccataccttccttctagaatgtcctccctatcctcacctagtccacgtccttctgcgtcctccaggaggttttgcagtccttcattaatactgacttttaaatgcatccggagcagccatttgtcagatgtgtagagaggataaaccttagctaggagtctgycaccctggaatagggaatccacctccccctccccckctgtgcccagttgtttgaggaggacacctcaggtaggtaatgccgtgctatccctgggctctatcggggtcattttatttcatcctcacagcaatgcacaagtgaagaaaccagccggagaaggtggcttctcagaggccacacagcttgggagctcaggagctaggatcrtgccaacttctgacttaagtatggttttgcttctgcctggaaaaccttcccctctcttcagccagacctagctgaaaatttgctcttcttattctagaaatattgcctcattcacagtgtcttgcagcatgatttggagccaagtagacctggattcaaattctaggtgacttactgattaacctccttgggcctctgtggccctgtctgtaaaatggagctgagctcatgcctcagagagtagtcatgaggacagaatgaaattgcgcagtgtgtttgtccttgtgcttggtttacagtagtggctggtgctgttactagtgctgtgatgactttttctattactgttctaacgtagtgtttataacttttatgaatttcctaaactttaggtcattccatcaagttttattatatgattcattgttggccagtgttttgcttcatagttagcatttgatatgagtaggtttyggtgcccggcagagagccctggcctgaggcagacactcaggaggaagcttttagatacacattgtaagatggcacctacacgctggcccgacatggtgctgttgagggtgagcagagtggtctgccttcagggtgcctgcagtttcarttggcagctggctcttcctaggaacaaggagttcctgactagcaggaaccacagcgtggcagtcttcattcaggatcaagtggatcagtattggagattcagtgcctaagacagagaaatgcaaagttggcagctgtttcaaatactttgacagttcattaactacacattttttttttggcggggcggtggcagagcagacagagtctcactctgtcacccaggctggagtgcagtggcacgatctcgcctcaatgcaacctccacctcctgggttcaaastattctgctgtctcaggctcctgagtagctggaattacaggcacctgccaccacacctggctaatttttgtatttttagtagagacggggtttcaccgtgttggccaggctggtctcgaactgctgacctcaagtgatccacccaccttaacctcccaaagtgctgggattacaggcatgagccaccacacccggccaactacaaatttttagacttcttttaaaataataaattttaggccagccatgttggatcacacctgtaatcccagcactttcagaggccaaggcaggaggatttcttgagccaggtgttcaagaccagtctgggcaacatagcaagacctcatctctacaaaaaaatacaaaaattagctggacatggtggcctacgcctgtggtcccagctacaagggaggctggggtgggagatcacttgagcctgggcagttggggctgcagtgagccatgatctcgccactgtactccagcctgggcaacagagcaagaccccatctcaaaaatcagtgaatagaaagacagatgttaagagttcttgagcatctgcaatggtagtttttctttttaatgagtgtttccttaccctctccccaataaaaatcaacaaccagcatgatcagtgttaagtaggagggtaagggctttgcaagckcttcatggcaagcggccctgccttttgctttccaagttcctcagcaaatgcaggagcaggcagaggtgggtacatgggcaggcctcctgagggctctgtacccactcttcaccacttgccgttagtgctgtggggacctggcgcccaccgagtcctggtcagtgcagtgaagcactgccttccctctgcgctaggagccaccatcgcactgctttcttcagtacgattggcttctacctgaaaacctccccttccctcttaagtcatatttttcttaacacagtcacatttttaagtcatatttttcttaatactgcagatttataatcagtacatcactttgtcaattttgaaaacgaaaatacaataatcatataaaataatttgttttttaaaaacattattaattttttttagcctaatcacaagggaaggattgtaattgtatatagtgtgctttgttaaataactcacaataatgcatgtatttttatggctgttaaaagaaagatggggccaggcgcggtggctcacgcctatattcccagcactttgggaggccatcgcgggcagatcacgaggtcaggagatcgagaccatcctggctaacacggtgaaaccccatctctactaaaaatacaaaaaattagctgggcgtggtggcgggcgcctgtagtcccagctacttgggaggctgaggcaggagaatggcgtgaacccgggaggcagagcttgcagtgagccgagatcgcgccactgcactccagcctaggcgacagagtgagactccatctcaaaaaaagaaaaaaaaagaaagatggatggcttggtccctgccacaaaaagctgaaagccttgattgtgcagggcagacaggatgcacagaaggaaagcagcacgtgccatggactctgtgttagagcctcttagaaataaatcctcagaactccagcagggcagggggtctcatccagggtttagcagggctttgtggtgagggtggcatgtcttctgggcactgaaagaggggaagcaattcagtaaggaggccttggtgtggagggccagacgggacagtgtgagtgaaacaagaygggcatgtgaggcagatgacatgtaggcagatttcctgacattgaagacacagcattgcccctgtggctgcacrcggtagctcagttcaccgtaacgaaggcctgcctctgccagcctgagaatagcagccttcatcttgcaggcagtggtgagcagtagtctgtggggctgtgagcaccaggggacgtgatggaagttctgttttaggaaaatttagttcaggagaattttcaggttacatcggataagaagagcctaagctgagcttcgtagcacgtgcctgtggtcccagctgcttgtgaggctgagcaggaaggattgattgagacccggagtttgtggccatgatcayacctgtgaatagccaccatgctccagcctgggcaacgaagcgagactctgtctctttttttttgacgtggagtctcactgttgcccaggctggagtacagtggcatgatctcagctcactgccacccccgcctcccgggttcaagcgattctcctgcctcagcctccggagtagctgggtctacagatgtgcatcaccacacccagctagtttttatatttttagtagagacagggtttcaccatgttggccaggctggtctcgaactcctgacctcatcaggtgatccacctgcctcggcctccgaaagtgcagggattacaggcgtgagccactgcacccagccgaccctgtctctttaaaaaagagagcgagcgagtgaccgtagaaattatgagaccggttaggaagcagttttagaagcccctgcctaaggtgagagactgaaggaaataaatgacagggagaatgcaggaaaggagggcagagaaaggacctgtggcctgcagggtggggaagagcagagggaaaggtggcctcaggtcggagaggctggaaatggactggcctgcctgagagtggtgggttcccgctgggaggcttttgagggggtagcagtcttggggccatcaggcagtggtcaggagacttccggagtgctgctctgcaagggaatgggttagatggcagattgcacagagctgtggtgaggacatggagcaagactagcggcttgttaaagaagttgaagaaacagtcatggaasggaggagggaagctggacagcagctagagggaaccggttcaatgcttttgtttttccctgaaaataaagacttacacagatttgaaggcagaactggggcttgggcacagaaagaatataaataaggcccccgaggagaaggccccttcctggcataggatagaagaataactttgtgtttggagacatggtgcaggaatggtggaggagctgctctattattagctctattaacttaaggtagaaaggtgtcatttatcagggttgggtggcggcagggccagagccagcagtggaggctcatgagcgtggagaagatgtggaaaggctgaggaatttctcagagggtgacggactgccagctgccctgaggttgctcttacttgttacagtggacaagctgctttgctagcgtgcagatggagaaggcgggcccgggaggcttggagtttggcccaggagctggcaggtgcccagcagcagtttcactgcccgcttcaggcgactctccactggcttcctgggagccttccgttaggagatgctctctcaagatccccgtcaccagggctttctggttggaatgaggcaaggacctgctttacacggtgcgccccattacccaacagcgtttcctgtccttgctggccacagccatcacagtggggctgtcatcagccactttaaacaggcaaaacgtatttacctgtcagggaaaataccaagatcacaaaggtggttttcccagggcaaggttcgtccattgcactccagatgtgctgacccctgcgatttcttcatatgtggggaactgcactcacactctccccagcaatacaaataaataagtaggctgggcacagtggcccatgcctgtaagcactttgggaggccagggcagtaagattgcttgaggccaggagttgaagaccagtgtgggcaacatagcaatacctcctctctaccaaaaaaaaaaaaaaaaaagcaaaaaaaaacactaaaawgtaactgggtgtggtggcctgtgcctatagtcccagctactcaggaggcagaggtgggattgcttgagcctaggaatttgaggttacagtgggctatgattgyrtcactacactccagctagggcarcagagcaagaccctatctctaccaaaaaattaaataataagtaaaccagcsaagcgagcacgtgcagcctgttggctcygccagtctttctgtcattgcttgttaagtctcagtggtgttgactgtgccttttgtaaacagtgttgaatggcattaactggaatgtggtagcctgactatttctttgacagtccaaaccaggttgcagagaakgtggcctccagaatcgccgagggcttcagcgacactgcgctcatcatggtaagtcrcttctgtgcagcatgtgggaggcccttgcgcctcctctcaccaacctggagcttgctctgcggcggtttcctttccgctaaccccttcactcatttatctgcttgagaccattgccgcctcttgcagttttctctcagctgcagaccagttgaatcccaggccatggcttctgtgcttccgcatcactacacaagtgggagtggggtcccctgccagccgcagcacctgggaacttgttagaaatgcgaattcccaggcacccaccccagaccccactgaatcagaaatgcgggggtttagcccagcagtccatgttaagacaccttctagatgattctggtctgaacatgccaagtgtgagaagcacaattagaacagccagcacagcctctaggggcacagggaaggaaggtccttgtatgtgagcagatgacatcaagggccttgctgaacagccttgattcagacagaatcctaggatgagggaagaagtcatgtttggaagcttcgcttttgtgaaaaaacaatgaaggacttgacgttttcctgcatgacacaacagttttcctcaggccagacactcgcgccactctgcatacaggctctgtcggaagagtctctgccccagccagcgtgggcacggctgcagggagagccccsaggaggcgcctgccgctgctgtttggctggcattctgttcactctcgtgtcctttgccttgtgctcaggtagacaacaccaagtttacgatggactgcgtagcgcctacgatccacgtgtacgagcaccatgagaacagatggcggtgcagagacccacaccagtgagtgcgccccatgctgccrcgcgggctgggctccttcagcgcccggccacgtgagagccactctcaccccgcctgtgttttcagttagcgttttctccagargcatgataccaagcatattccccggcksctgtaggccccagtgttccagcgcttccaggcagtagagggaacctcagtggtacccacaggtcttcccaccccaggcgctagagcacagacactcttcccaggcctgtgctttgatgtatctgtggccactcagaaagcttcagtcatctgcctccaactttctcagaattccacgtgaaaggcgtcccttccatgtattaaccatgtcttctatgctctgtatacctcttcatgcgtttgaaatgcacatgtttctcagtactctgcaccatctctgttcataccactgtgcatgtggctggccttctctcttgatgctgttayaagccgcccgttttcactgttagatgctgacttcttcatgtttgacccgtagtgactactgtgaagactggccagaggcacagaggatctcagcctcgctcctggacagccggtcctacgagacgctcgtggatttcgataaccacctggatgacattcggaatgactggacaaacccagagatcaataaagytgtcctacacttgtgctaggcaggcaccgctgtgactgggctccgggcctttccactacgttgaagaagaaaacctatttttaaatgtaaataaaatatctkgtagcctgtgtggaaagctgaccgttttaagaagtggcatgtgccttgaaagggggcagaatgttcagtcggtcgtgtttttaacacagagtctctagaagaggtgcagacatcccgtctgactgtccctgtggactctctcagttgtatgttgctataatcctccaaatcaaagctctttctgcttgtgcaagattgttcctattaaacagttttaactaaccttttataatctggagagaatactttttaaggcttttgaactatcttttttttaaaaaaaaaaaaaagcccacatcttatactccaatgagtgtgtttgtgagtttttatcctgtttgaattttgatgtcgtccaggcgtcctgggatcagggtagacacgtggagtgctggtgctgagctgtttgagaagctctgtgtgggtgtttctgtggtcaggtaggctgggctgtgaacagcactgctccacatggtgtcggctcacagagccaccgcaactctgcccagcgggagtgacaccactgatgccacagaagcctttatcgttaggggcaaaagcagacatctctggtagcaggagctcagtgtggtgctcttcagccacgcagaaagctcacgtgcctgcagggccaggaaagggaaatgatcgtttcttttgtattaggaaaaacaagacttagacttcccgagttgtgcagagtgacgtctgtactttttatacttagaacatttggtcaagttttgtaaccaaaccttagggaattgagagggaaactttatggtacgtttaccttttttcctttttatatgaattattttgtacaaagttcagagagcggtacctttcctactgtcttttctttgactccatggaggaatttgtaacgatcggtgtgacctgaaagggtttgtgatacagcggtcactattttctcttaacacataggaaaaaagttcagacatcgctacaataaatgtgctttatttgatccaccaaattctctcttcccctttcttcaaatacctcttactcttgattttttaaactggcgttctttcacgtggggagcacaggaaagcgtgaggtgtctgtgcagccccttctctcccctgcccttggatgccaaagcatcacagctggagcgaggtgggcagtcttgttccgaatgggcttgggtttgtttcataaagggagaagaatcacctccagcatttgcacgtaagaagctgttttgtcctgagactgaaacagcagcgtaggcccctccagttagaagtccagggcagctggcagagctacttggaatgaaggttggtgaaggctcgtttgggaggcattttaacgacacagccctcctaaaacccttcaaggtggctttccctctgccacctccctgtggaattcttttccttggttctcctcctgcctcccaggagcatgtgctgtcctaaaacccttcagggtggttttccctctgtgtcacctccccgtggtattcatttccttggttctcctcctgcctcccaggagcatacgctgtcctctattttggatttaggccaaagcttaagccacataacctgttccctgtctatggctgagtcaggcttaaattttctaaagaaaacatatgagataccctgaagggaaggatatatttgtgaaaagccaaaacagatttccaaagtgcagatacctgctcctgtattccttgtaaaaatagcagaagcctctgctgagcccttagaccctgtgctgacccctctctcttggtctacacacactgtgctgtgtggcctgtgctgcctccctcttaccacctccccaaaaagacagagtctggccctcagcttaggctctatcttgccccacccagggtgaaagaacaagcctgttgcagagccacctgaaacttactcacactctgcttttttgtaggaaagacaggagcaacacaaagtatgtttgtatgttgaaaatctgccctacaaaatgttgaagccaggatccagtgctgtgcacctgtggttccagctacttaggaggctgagcaggaggatggtttgagcccaggattttgaggccagcctagacaactagcaagaccctgtctcttaaactaaatctgagaggggttacacctatgttgacgtgtgtttagagacacctgcctttagagccagccatctgcttacagtcattctggtggccattttcatctttcatagcatccatccgttaagaagtaagacacatatattattagtttatatgaaaatgtcatattctatttctagtcatggttacctttaagatccgagggtactaaacatgaaagataggcagtaacttcataaatactctaaaaagcagtgcacttactaaggaaaagtcaactttgctaatgaaattggattgctttagagcagaaaactaagacatcttagttaaattttcaagtcagttttccatggatctggtatttgtaagcctcctggatgtaaaaagtccttgtataattagctttggtttattttatttttagacagggtctcgctctcactcaggctgcagtgcagyggcaggatcatagctcactgcaaccttgaactcctgggctcaagtgatcctctactccatcctgatattactttaatagcgtatttttctggtagttgtctcgaaaaacctattgtttctgcgaagtgcgtttctcagcttttcacatcagccttttttgttttgatttgcattggcaagacagtgtttccaaaacctcctttttagcattacacttctcttgccacagtagctactttatgcatcatggtaaatagaagcagaaaaatagccttgagcagcaaactctattccatayggacatttttagcaattttagtgaagatagccgaacttaaaaatagacttccgctttagtaattgacatttcttgaggcttcccatcaactcttaatgcctcttatgcattggactttttttttttttttttttcagttcaatcaaatgcctggtaggaattgctagcgttgcccctgccaactctcaggtatgtggtgtcttaatctgacttcatttccatacatctcagaatccaggagataatgtaaatattttcatcctcataaagttgactcgttactctttaaaatcctcacaatattcttgaatgggacataatatctaatcgagtttgttatttcttagaagtgaatcacctgctgggcgtggtggctcatgcctataatcccagaactttgggaggccgagggggttggatcacctgaggtcaggagttcgagaccagcctgatcaatatggtgaaaccccgtttctactaaaaacacgaaaawtagccgggtgkggtggagtgcacctgtagtcccagctacttgggagactgaggcaggagaattgcttgaacccaggaggcaaaggttgcagtgaggcaagatcrcaccactgcactccagcctgggcagcagagtgagactctgtctcaaaaaaaaaaaaaaagaagaagaagaagtgaatcaccattcttctgaggagccttttttcccttttaggattaacttcttggagaagatgtttccttgcaggtttctgaagtgctgccattagagaagcsatctgaagacttctgtggaataggagatctagcccagctttagaacagccgagaatcatgttcttggtcttttgctttcagagccaagtgacaggcacccgtacggcggccacttgagtttgactagaggagcccttcagctctcacttgctgtgttaccttgtaaagcagaatagcatcctgtatttagagctggctgaaaaaattctagattccatcaatacacctaaagaattgcagttcagaatactcatgacgttctgtggcccaagtgcctgccctctcggcccccggaggcaggacccccaagttccaccaagcaccctgggtgcccaccctcactgaggagttcagtgaaacctctaaggtgggccaggattcagtagcctccaggttctcttctctgcattcccttcattactaagaatacagattcttcttcaaggctggactttctcaaaaagaatcttgttcttgcttccagcagtgcctgtttcccattctgtgtgtgtgtgtgtgtgtgtgtgtgtaagacagagtccctctctgtcacccaggctggagtgcagtggtgtgatctcggctcactgcaacctccgcctcccaggttcaagtgatcctcccacctcagcctcctgagtagctggaattagaggtgcccaccaccacgcctgcctaatttttgtatttttggtagagacagggtttcaccatgttagccaggctggtctcgaacacctgacctcaagtgagccgtccaccttggcctcccaaagtgctgggattccaggcatgagccaccgcacctggtccccattcttaagataacccggcagagctgcgacagcccctgcggtttccactagcagggggagctagtgtggttgggggttagggtgctgctcccaaagcctcctgggggcaaatcccagctctaccactttctagctctgtggccttgggcaagttacctcgtagtgataacacctgcttgcatgggtgttacggagaccacagcgcttttgctaatacttagaatattcgagccatgatgaaaaaagttcttaactggtttgttgttgttgttgttgttgttgtttggtaaatatagaacattctgttgaccagactgacctgagaggtacttactcataggaaaccttcagtgaacatttattgaatgagtgaatcaaaccattcattcccaaatgagagcagtttacatctgccttcccagcaaccctatgacagttccarttgacagacaaggaaatcaaggcccaggctgcagaagtgactgcctgaggctgcacacccagtaagcagcagaggctgtggcagaggactgcacagggcagccccactgctgccagcaaaaagccatgtcttcctccactttccatcctccccttccccattcttgctcaccccccaccccagttttaatacattttcttcctttctacaaaatcaatgtatgttcatggtagaaaatcaaagagaaaataaaaatatctccattctcccatgcccsctccttcactagacaagtgtaaggaagacagaaagtagtcgaaccagcagggattttgtgaacacctttattgtcccagatcctgagatacaaagaaatggaaagcatggcgcctgcatttgaggagcttacaatgtaatctaagaagtaaaaggtgggctgggtgcagtggctcacgcctgaaataccagcactttgggagaccgaggtgtaaggatcactttaggccaggagttcgagaccaccctagacaacatactgacatcccatctctacaaaaaaaaaaaaaaaaattaaaattagccagacatggtggggcacactgtagtcccagctactcagaaggctgaagcaggaaaattgcttgagcccaagagtttgyggctgcagtgagccatgatcatgccatggcactccagcctgggtgatagagcaagaccccatctgtctctctcgctcttttttttttttttttttttttggtaacagggtcttggtatgttgcccaggctagtctttaactcctgggcttaagcagtccttctgcctcagcctcccaaagcgctgggattacctgagcgaccacacgcagcaccccgtttctttaaaaaaaaaaagcaaaaggcataaataccagtaaaatattacaaagtttgtgcagattcctgggctcaggtccagagaattcagattcrttgagatttggggcccaaatcctgcatttttagcaggtggattcaggccatgctataaataaccctgatctttagccaaaacctgcattttactatgaagaatttcattttattattattattattattattgagacggagttggtctgtcacccaggctggagtgcagtggcacaatcacgactctatagccttgaccttccaggctcaagccattctcccacctctgcctcccaagtagctgggaccacaagtgcataccaccacacctggctaattttttttattttttatagagacaagatctcactatgttgcttaggctggtctggaactcttggcctcaagcaatcctcccacctcagcctcccacaatgctgggattacagataggagctaccgcacccggcytgcgaatttcaaatatgcagaaataagcaatttggccaatggcacatgttcagccaggaactgaagaattggggcataaggttgaatgctatgaaattgctaatttagtaagtcaaaacctcaaacatcagcaatttcataggagtcgacctaacagaattcagacctcctgaatgaacgctgttatctgtctccacaggaggccatctgattttctgctctttcaaaatttattgcacaaagaatgtgtgaatgtgatctcgattaagaacagtggagcaacatgggggcgcggtggctcacgcctgtaatcccagcactttgggaggctgaggcaggtggatcaccaggtcaggagatcaagaccatcctggctaacacggtgaaaccccatctctactaaaaatacaaaaatttagctgggcttggtggtgggcacctgtagtcccagctacttgggaggctgaggcaggagaatggcgtgaacccaggaggcggagcttgtagtgagctgagatcgtgccactgcactccagcctgggcgacagaacgagactccatctcaaaaaaaaaaaaaagaacattggagcaatataaagcagacagattgtgagccatctcagccctggagccaggacggcaagaaatgacagggctttacactgctttctgtctcccaaagcatcctacacatagaagacctagttgtttattggtgtttttttgtttgtttttttgggatggagtttcactcttgtcacccaggctggaatgcaatggcgtgatctcagctcattgcaacctccacctcccgggttcaagcgattcttgtctttgcccmctgagtagctgggattacaggcgcccaccactacacctggctaatttttgtattattagtagagatggggtttcaccatattggccaggctggtctcgaactcctgaccttaggtgatccgcccgccttggcctcccgaagtgctgggatgacaggcgtgagccaccgcgcccgcccgtagttgttatttttacttaatttttsagaagttgaatctctagtctgtcacgtactccccrcttccagcaggcagctctgtagcaaggcctctctgtcagctgcctgtctggtctctggggccctggcccagtccctgtgtgtgcaggacatgcccccagagacagggtattgatccctatttccttcaaaatagctctacctttgtcaccaggataatggcttgttggtttttttttttttatccaaacacaaaaaggtacaaactaaaaaagcaaaatcacctaaaatccccccaatggctgaatatccttctaatcatctctctcctaaatgttgggattctttatttttggcttgtgaagtctgacatttaaatttgttgatagagttgtatggtacaacacttttttttttttttagacggagtctcgcactgtcacccgattggagcacaatgccgcagtctcggttcactgcaacctccgcctgctgggttcaagcgattctcctgcctcagcctcccgagtagctgggattacaggcgcccgccaccacgcccagctaattttttgtatttttagtggagacagggtttcactatgttggccaggctggtctcgaactcctgacctcgtgatccacccgcctcgggcccccacagtgctgggattacaggcatgacccaccgtgcctggccggaacactttttttttttgagatggagtcttgcgcttgttgcccaggctggagtgcaatggcacaatcttggcttaccacaaactctgcctcccaggttcaagctattctcctgcctcagccttccaagtagctgagatgacaggcatgcgccaccatgcaggctaattttgtatttttagtagagatgaggtttctccatgttggtcaggctggtctcgaactcccaacctcaggtgatccacccgcctcagcctcccaaagtgctgggattacaggcgtgagccaccgcgcctggccttgaattacaatcttgccaataaaagtgttccaccaccaggaacacatgagatgcctcaaaaaaaaattgtaattgatattttcaggattatgtaaacacttcatttccagaaccactgtttggacccccactatgtgaataccctaaattttgtttgtatcctcatcttagttgtatttggcagagggtgtttttgaaaataaaacttatttattgacgtttaagaggtacccagaaaaggacacaaatcataagggtatagctcagcggaggttcacaaggtaagcaaaaggacaggctcctggaagcaccaccaagctcaaaaaacaggctctaagacgccccagcacccaggagcccttgtgtccacaccctggactagttctgcctggctctgagcctgtgtaagcgggagcagacaataagtattcttactgtgcgtgtgagattcacctgtgacctgatatgtagcaatcttttattcattttcaccgctgtgtgttattttgttgtatcaatgtaccccaatttatccatttctatgttgatggatatttgggttatttccagatttgggctaacacagctgatgctgcagttaacattcctgcacgtgccttgccacacacctgtgtatgcttttctttcaggatatgtagcgtggacttgctaggggtgtgtgtgtgttcgcttttcaagatatgttgccagttttacaaagtgattgtacgagctgaacttcccacccgcagtgtctgagagttcccatgtcctcagatcttcagaactttgtgttattagcctttttttttttttttttttttttttttgagacagggtctcactctgtcgcccaggctggagtgcagtggtgcaatgataactcactgcagccttgacctcccggctcaagcaatccttccacctcagcctcccaagtagctgggactacaggtgtgcgtcaccacactgagctacttttttggtagagacagaactttgccctgttgcccaggctggtctcaaactcctaggctccagtgatctgcctgccatggcctcccaaagtgctgggattacaggtgtgagccactgcacccagccatcagtcttttttatgttagacattttggtagtatgtagtagtatctcacagattcttggtcaaaatatgaaaagtaaaacgatacatcttctagacaataacaggaggatatattcatgaccttgggcttggcaaagatttttaaacaggacacataaacaataagttgtgctacattaaaattaagaacttttgttcattaaaaaacagggtggtaaaaagggaaatcccacagtgggagatatttgtaatacaattacccaacaattatccagcaaaagacttctttccagagccgggtgccatggcacacgcctatagtcccagctaattgggaggctgagatgggaggatcgctagagcccaggagtttgaggttgtggtgagctatgatcacaccactgcactccagcctgcatgagagagtgagaccccatctccgaaaaaaacaaaacaaggcttctttccagattaggcacatctcaaaagaagatatccaaatggctcataaacatatgaaaattgcctcactaatgtcatcaaagagaagccaagtgagaacatgagtctgtttttgtttttgtttttttgagacagggtctcactctttcacctggcctggactgctgaagtgatcctcccgccttgacctccaaaagtgctgggattacagacttggacaatggcacctggccatgagtctgttttcttccctttctttcctcttttttttttttttttttttttttgaatagtctcggccaggcgcagtggctcacgcctgtaatcccagcactttgggaggctgaggcgagcggatcacctgaggtcaggagttcaagactagcctgaccaacatggagaaaccccatctctactaaaaatacaaaattagccaggcgtggtggtgcatgcctgtaatcccagctaacagggaggttgaggcaggagaatcacttcaacccggaaggcagaggttggggtgagctgagatcgcgccactgcactccagcctgagcaacaagagggaaactctgtctaaaaaaaaagaaagaaagaaaaaagaaatagtctccctctgttgcccgggctggggtgtagtggcgcagtctcggctgcagcctctgcctcccgggttcaaggaattctcctgcctcagcctccccagtagctgggattacaggcgtrcaccactatgcctggctaatttttttgtatttttagtagagatggggtttcaccatgttggccaggctggtttcaaactcctgacctcaactgatccacccacctcggcctcctgaagtgctgggattataggcgtgggccaccacactgggccatcagtctgttttttaatgggaagaaaatgtttagaagcagaatcctctttgtgtgcacagtccaagtgccctggataccccaggacagtttcacacgtgtgactgagcgtcagaatgccttcaaacaaacagcagcctccactgcctctttcagtcctaggcctgaatattcttgaaattcttggcctcggtacctggcctgggcacataggtagcagtggttcttggtctgagggtttcagccgtggatctctcctgcactgttgagtggttttcctctgaggggcttttaagaaaggctatatagtcccaccctggatgtcatcacctactgcctctaccagcctggcctcccaccagtcctgccctggagctcagagcaagacctcccagaatctgattgttctgttaatcacctacggtgcctggaattctctcagtgccagctttctgaggagctcaaaaccatttgcagatcctgctggtaaaatggctgccctgaggtcagctgagctctgtgctaaattacttctgcaataagaggcaattttccaaactgtgcctgagagtcccatagacccagagctcctcacccactggaggccttgggaggaaggcagtgtttaaacagacatcctgggactctcccgtcagggtggtggtctccatagttactgggatatggttctcacggtaggtagagcgtytgctcacacagcccctccgcctttacacctgggcagagggaagcaggcaggactgcatctgggcaggcacgtaggctggaagtagaaaaaggagggatgcattttcactaggggacccgtggagcaaagcgggtgggaaaaaaaaagtccaggacccaaagaaagtgccagcttacctgggtatctccccatcttcagcaaggggtcccttggctcacttcccatatgcacatcccaagcagcccaccctgacacagccctaggtgttctgaagatcccatgtcttccctgaacctccaggaatgttgggcatagctgctctgagctctgccccacccagactctgccttcgaaagtcttacccaggctgactcactgtcctattactcagcctttctggttgctgtgtttgggataacggaaagcacgaagggtagcctggggactacgggcagtgttgagagagtaatggagtgcagggaaggccgcagacaggaaggaacctgagtgcctggaggggcagggaggtacccggggaggatggagcgccaagcaagaagggtcacaggtggggctcccatttgcaagtccgggtggcagggaggtgacagtctgtgggggtttgggcagagaaggtcaggagaggcggctgagatggcacaggaagcccttcttgcccctagctgctacctcctgcgccgtggttccacggagcgtcactccctctgtgacttctgggtcagccgatggggatggacagagtctggcagtgggtacaggaaccctcgccacagtgggtggccttgaactcctgaactcaaatgatccacctgcctcagcctcccaaagtgctaggattacaggtgtgagccaccgtgcctggccatgaactttatcttaattttaaaataaggtggcgttcggtggctcatgcctgtaatcccagaatttttggaggccgaggcaggtgaatcgctagaggtcaggagtttgagagaccagcctgggcaacatagcaaaaccctgtctctattaaaaatatacaaattagatgggcgtggtgacgtgcatctatagcctcaactactcagaggctgaggtgggagaatcacttgaccccgggaggttgagggtgccatagagccatgattaggccactgcactccggactgtgtgacggagcaaggccctgtctcaaaagaaagaaagagagagagagagagagagagagaaagaaaagaaaagaaaagaaagaaagaataaaacaatagtggagcatcaggaaaagagatctgggaagggggcacagggaagggggaaccctcctgggctgcctgaaaccccagtatggggatcaccaccagccaccacctctctcccactgccatgttaagggtcccagctgggcgtgggggactggattctgcttttcctccctgaggtccagcctcgaagagccgaggccacacacaactagttctcatgaggaaactggaaactctcctccaagcctctcagggttgcaaggaaatgaaacaggcatcagatccaacctctccaataaatccagtgcagcgatcagcccgtgcctaacccgcgacgttcggggaactcactgggtcttgagcagctcaagcccgctgctgattgccagaaatttccccctatgctgtatggaaaccatttcctgaatctcccatactaaccccagtgtcacccttagggtcccccaagatccccacacctgccttacccaggacagatttgcagaagtgctttcctcttcccgggaacacgcccaccgtcagtcttcctccctggcagtggcttagttcccccaccacrtgggcttctgtcttcggcatgggctcgggttggtccattcctctaacctcagccagacagtgggatatggaacaagggattaaagcttcccacagccacgcgggcaacggcaaggcctgagcttaaggataatttcccttctctgcaaaggccaggcatttagtctgaatgggcagagtctgcaaagagtgggccaggaagggacggggagcagccacagcccagatggcccagaagagcgagtgactgtccccaacctgagcgaggtccctgagacccaaggtggctactgatctcttatccccagaggtaggagggaaggtgggtgggagcctgggagggggctccgggcagagctcctgtgtgtggcgggggagcagcctggtctcctcccctgccccaggtccctgggaggtgtgggaagagcttcctcctctttgccctctctcttcacctcctctcaatacttaatgccaccttctgggtgcccactgtgtgcccagcacttt

SEQ ID NO: 93638 - DNA, 19415 bp, Homo sapiens
gcatgggagagctccagggcagccgccgtgcagaggagcagaggacaggcccacatggaggccacagcaagaattctagcctgaaatcatggtgatgaggccagtgagcaagccagcaagtcatctgcgcagaatgtaacagaaagctactccaccgcactagaaatcaacaaggggaaaagggcagaaagggattagagaagcgggttcaagctaatttccatactaacattttatgggtttctgctattaggaataattccttcactacctacgtcaaaggkttataaggataaataagttaataggcgtaagtacttaaaaaaacataaaaagcatgcaaaaagcatgcacaaatgcaaggatttttttaatggaaaataatgaaaagcctttcaaaggaatctaatgttgtcctttgatagacagtctatggtctttcccctttatcaaaaacaattccaataggaagctctctgaatggaacagagccatgagaacaaggcctcatttacacagctgcatggatttagatgctttgtgaaaactgcatcttctatggctgataacctcataaactatggctctaaacactgagagttttcattgccttcaggttaggaagtcactaagtcaaaaagtgaataatataaatttaatagcttaactgaagtacaaaatttgtggatggactccagctgcaaattttcccctgtaactttcctctgaaagttatttcatgggcactggattgctgtctttttcatatttgcccactgctgagggaatgagtttttgtgaatatgagaaaagtcagggctgagtgcggtgactcacgtctgtaatcctagcactttgggagggcgaggcgagcggactgcctgagctcaggagatcgagacccgcctgggtgacacggtgaaaccttgtctactaaaataaaaaagaaatcagccgtgcgtggcggtgtgcgctggtagtaccagctacttgggaggctgaggcgggagaatcgcttgaacctgagaggccaaggttgcagcgagccgacatcgctccactgcactccagcctgggtgacagagtgagactccatctcggaaaagtcagtataaataactattgcctggcaaaacttgctgcttgttttcactgctgaagagtagttaccgcagggagtcaagtgtggaccttacttgctggatggggactcatgtggtggggggaggtgctggaggctggatgtctacagtgcagactgtaactaggaatgaggcgcgggagcaaggtcagagtgggcccctgcggtgcccggtgccctctcacgctcaggtagcaggcagtcactgtcccctctgggcatctttcctccctggtaagtggtttgggaggcagccctgctcccccgtggaaaattcatgtacaggtgacttgaatgcagttgtttatagttcctgggtttaactctgtcaagtactgcattcatatcccatagtcggaacagaagtgtttaactctgtcaagtactgcattcacatcccatagtcggaacagaagtgtttaactctgtcaaggttacttaagaatgagaagaataagcaacatctgacattccaaatgaggttcaagtttgtcttcaagaagctcctagaagtttctgacaggattttacatggccagcagccaccacaccttcttctcccactcctgggctggtcctcagttgctctgtgactcctcctccactcaacccataaaagccagagtgccccaagccacgttcctggggtgtgatgagagacactggttttcctccccgttcctggctcctcacggccctggttagtcttttgatagaatgccaggtgcgtgagcctcaggggcgctaggaccccaccttctcctgccctccttccactccactgttccctctccgcctttctgacggtgggtcttaagaccctccaggagagggtcccccctagacctcgggggaaggaatgctgatgtcatgaagctcccataaaaacccaagaggacggggagcttccatgcccctttcccatacctcgccctatgtgtctcttcatctgtatcctttgcagtgtcctgtataataaacccataaacataaggttttccctgagctctgtgagttgctccagcaaattaatcaaatccaaacaggaagccatggaaaccccaccttgaagctggtgggtcagaggttccagagcctggacttgctgctgagccctcaacccgtgggctctgacactatctccaggtaggcagtgtcagaacagaatgcggagacacctagctggtggccgctgcttggtgtgtggggaaactcctatacatccggtcacacaagtcttcttctgtgttgactgttggcggtgagagcagaggacacacgcggttggagagcttttccctacgcagtcctcaagtgctaagacctgctctcatggcttcagaagtcaccggcacaccactggttctcaatctacatccatctctggtctctgtactcagacccattcttcacctttcaacctaggacttcttcatttgaacatctcaaacttaacataccccaaacagaagtaatcacctcccctccagacctgtttctctgcctcttccctcaacaaatggcaccagtgcaccatcgtcccagcgcacaagccaggaacctaggtaacacccttacttccttttcccctaggtccatgcacgattagtcaccaagacctgtggattctcccacctgctctctcttctgtccccttctccgtacccatgctgcactcagttttgccacctccctgcctctagtcttgggtgtactcctgtctccagcatcctttctgctgcaggctggggccatcactcgaaggcactgatctgatcacgcaactctcctccagtggcttccctctgtcctcaggatggtgcccaaatgcctctgcatgatctacaaggtcactacaaagcaatctgtccaccactcaactctctctgcccgctgcccctttacactccatcctattgctctctccaaactcccccactcgctctcctctcccgcccactattttctcctgctctttgcacatgctggtcccttgaatgttctccctccatcccccacctcctgagggtcaaaggctggcccgctgcctgcatgttcctttctctgggcaacctgactgccctgattgcccaagcctaggctggctgacttctctcgaatcccttgccacttttttactaagctccgcctgtgaggtttaggtgctgtgcttgctggcttgctgcaccttcaagtgctaagcaggtactgtgtttcatccacagccatatccctcctcagcacgggcctggcacaaagcagatactcaaaaacatttattagaaaagtgaataatcccgcataaatgctactgatgaatctagctccctgcaagtcaatgcatttcacagatccaataattctcttgacaacagaacaattaagatggttggaaaggctgagcgcagtggctcatgcctggaatcccagcactttgggatgcggaggtggccgtattacttgaggtaaggagttcaagaccagcctggtcaacacagtgaaaccccatctctactaaaaatacaaaaattagctgggtgtggtggtggacgcctgaaatcccagctacctgggaggctgaagcagaagaatcacctgaatctgggaggtggaagttgcagtgagccgagatcatgccattgcactccaggctgggtgacaagagcgaaactccatctcaaaaaaacaaaaagatggttggaaagacctggattaaaacacacacacacactccccagtggtgtttcagtaatgacagcagatatcttcaagagctaaaatacttagttttataaatatcatctaagtattataatcatctgaatcctacccggaaatgatatgaagtttaactttaacaggcactcaaagatgtgcccaggaaccttacgccaggactctttgcccagagatacttcttgcttgcccagaactgacttgggtgtcataattagttaagttataaatggtagattatgaaatggcttcgttttacttggtggaggagggacacagataaagaaattctacttacaccttctcaagcttagctacttcttacatcaattagctactattttttagcatcacagtttattcttaaatgaaaaacaaacagcacctcagctcaggtatgcaggtctgaagctacagtttacttttccttcaggttttaacaactcgatggaatttatagatggtctttttcccttcattgatcaccggaactgaaaagctactgcctaaaattcacttaccaactagtctacctgcatgctacatcttttttcccactgtacttcaataaagctgtcattgcaaacaaaaacataaaagcgtgttggacagatcgtctgctcctgctgtttaatgtcacagaaattcgtttttttttttttttttttttttttgagacggagtcttgctctgtcacccaggctggagtgcagtggcgtgatctcggctcactgcaacctctgcctcctgggttcaagcgattctcttgcctcagcctcccgagtggctgggatgacaggcgcccgccaccacgcccggctaagttttgtatttttagtagagaaggggtttcaccatgttggtcaggctggtctcaaacttctgacctcaggtgatccgcctgcctcggcctcccaaagtgctaggattacaggggtcagccaccgcgcccggccccacagaaattctttagcttttaaaagccatggaaacattctagataagttgttaaccattaacgggaacaaattctctttacacaaagctcaggcacattcaatcaaggggagccaggcctaagatgcatcacacagatctgaccatgcaactacctttctacaagtgtctgagctccggggtgcccgagtaccgacagccaaagaagcatttacactttgccagataaggaatcggctctgcgaaggtgcgaagaaccaaatcctagcgattaatgtcccaacaacgtgaacacttcctgcaactcgaaatcctcaagggaaactctgtcgaatccccaccaagtgaacgatgacttgtttctacaaaggctactgatttcaggaaactaacgtataactcgtcgccttaaagtgcctctaaaagcatccacgacggttaaagtcgctgctactacgggacgctatttattcagcgccaagacccaagcgccatcgtggatcaccccattcctggccacggcaaccctagggagcgggtcctaggagcctgctggagggcgaccgctgggccagcttcctctctgctgactgaggggaggccaggctgcctgcaaggggaaggggccctttccgcgcttaccagggtgagagccacctccagcatgggggcgagggccagggtgccgtggaagagggggatgcagtccacgaagagggtgtggtgggcgccggggccgcccagggggaggtgctccttacgyggcttctgcttctcggccaccaggagcccgttgacggcgcagtgcgggtacttggcgccgtgcagcaccatcttgcagtaggcctgggtggtcagtttcaccccgggcatgctgacccgggagggccccggaggcccctgggcgcgcggctgaggcctggacccgctgcctggccgcgcggcgcctcagccgagaagcgggacgaggcggcggcgattgatggcgcggccgcgggctggcgkgggacccttcaggcccggccccgtttgggcctcggctcctggaaaagcgactcgcgcctctgggaagccgcagccccagactccagtcgcgcttctcgcccggcgccgccggaaagcagcctctccaacgcctgccggaaagcagcccggcccggcattttacgacgttcgcagcgctacccttttccgctccacggtgacctccktgcggccgggtgcgggcggagtcttcctcgatcccgtrgtgctccgcggcgcggcsttgctctcttccggtcgckggacaccgggtgtagagggcggtcgcggcgggcagtggcggcaggtgagacaggaggtggccggtgcggcgccgccaggccgggccgggtcggggggccgggagccatcaagtctgcacgtccgcagcctggccgctcggcttcagcaggaagcaccgaatgggcctcggagccaggtgacattgaggccggcccgtggggactccgggctcggtggctccaggctcggggggccgccccgaagtgcccggtccatcttacccggtctcgcagcggctgcggacyggcctcgggcactgaccttggagcgcccgctggccgagggctcaggctgcggggaggcgggcccgcgctctgtgcctgcagcctccgcccttgctccttcmaaaggtccctgtgcaacccctcccgggttttgcgggrctcccgggcggcgctcggctttccagcctggaaggcgcctattgtttgctcacgcaagggctaggcccaaggagagaagctagacgcgggcgttcagccctgacgtcatgcttgtttattctgccccaaggagggtatttccccacatcactctcaccagtcctccgaagggtcgatttaaagggggccgtgtaaggttgatgggcctgaatagaggagggcccgggtgagggggggtctcataggttttccgctctcctcagggattggaaattgatcggggctgtgttggcagccttctccaatttccccttctagtctatgtacaggcggtattaggttttaaacactcagttgaatgtgatgcgtgccacggtccctgtgagctgtcacctccccccaccgctccctgaagaatggagyctgtcacggcagcacagtgctttaatgatctctagctttttcagagtcaccttgttagcattttttcttcttgcctttttttgtttgagacggactcttgctctggttgcccaggctggggtgcagtggtgcggtctyrgctcactgcagtctctacctcccgggttcaagcgattcttstacctcagcctcccaagtagcggrgattacgggckcccactaccatgcccggctaatttttgtattgttagtagagacgggatttcaccatgttggccaggctggtcttgaacccctgacctcaggtgatctgtccgcctcggcctcccaaagtgctggaattaccggcgtgagccaccgcgcccggcctctccttgtttttttaaaaagaccaatgttctgttaattacctgaagcgcgtatatattatggcagttgatttataatgaagctccttaaaagcatgccaattactaagaaaaacctcatcctaggtcattttgtgaattcagagacagtgataaagaatggatcatttgcgttggggagaagcaaacaaaaaaattccaaaatgctctggggcaaaaagaagactaattccttgctgtttgtccttattcatagagaaggtgtacatttttatctttcagaatgttgrctaccagggtatttagcctagttggcaagcgagcaatttccacctctgtgtgtgtacgagctcatggtaagtgtgacttttcttacttttaaataggctgaactaatttcattttgctcctgctgtgtataaagccctgtgctggagttttaaagaccttaattcggctcttgagggtctttaggggagatataaatgttctcacagggcttggttctagattaagaagtgtttataagtcaaattgaatctcttctggatctttggttatactgatacttccccacttacccttcccttccgttccacttttttaagcttcgagatctacccctttcaaaagatcttctgcaccataactgactgaccttaatgacctccctccccaccttgcccccacaactcccaaccatttgcatcacctctgtttacattatagaggcaatggaaacgaaagagcctggacttcctagcctgagctgggttttcatctcatttctatcaaggactagctactgaagctcaggaatctctttgctcacctgaagtatatggacagagcttagttctgtgtctggcatacagcacatttacttttgcatgtatctggcgtctatctactttgtaccagacactgttaggcaccgagaagaaaaagaatatgaaatacacacactttccaggaggctgtttgcaatctgaagagggacggatgggtgaagacagtgttttattaagagatggctcctgggtagaagcatttagcccgatgtgggtttcagggaaggcttctggaggaaactctccagggtcttttcattgccttagtagagtctacaccctgcctggttagagctggtcttgcctgcctttccgatcttattactgactgttgtactcaaaacccaaaaactaccatcagaaccacccatccccacttgctcactgccccagccccctggccttactccattcctcccgtagagccccgagttgtggrtggtcgctcctgtctaatcattcaccctcgatacaaatgtgcttttagaacggsctctcctgaccatcctttctcaggaagctccctgtcacctcaccttgctgtgcttttccttataacactggatgcctcatgaatgcatgtctatttgagtattgctgtctcagcctcttagagtgtaagccttttgaggccagggagcctgcctgtcttactcattgccgtatctccagcacataggaggcagatgaagacgaactgcagrctcttagacaagtcttctctgttaagttwtaacttacgtaagtcatacatgaataatacatgaatstgttctcaagatattaaagcagtctggaataccatcagccgtcactgaagtcagttgggatatttgtgtggtgatgcacctgagtaaggggtgcccagatayaccagatctccccagcagaggctcaacagaaatcsgtccatgttgaagcggtgacaaacattccttacaatctggagtctttgtttttctctctctctaaaagaaatgtttggtatattaaccattgattttcccttaattgctgggggaccaggcctgaagctctgaagaacccctgaaaccatgaattggccattcttattctggaagatgcaattttgaggtttgcatgcrccaaggttttgagggtttaygtcgttataatagctttttccccccagtctccctgtcatggcatttacaacagctttacaagatgtaattcatataacagtcacccatttaaagtgtatsctccagtggtttttagtatattcattgagttttgtcattagcaccacagtcagttctagaacattctcatcacccatatttacatttatttttaataactctcatgtgtaagctgagtgttttaaactttagaracttctggggggtgctgaacttgataaaaatattcagtatacaagtgttctttatagttcactcatcattttcatagaattagggttttaaaattagaaagtaattyaggccatttccatctcctgtccctcaaatcccagctcagttttgggatgaggtgtcaagtataagtttgtaagtatgccagtcatttgcacggctaagagaaacatctagagaagtctatatacgacttgcttaaagctgaatgttgatttactgttcacatgatttgggygattttagtcactgggactgagctaatggagttgaagcattgttgcgggcattgtacctccagaccagtgtgtaatacaaagagttcttgcagacrtaggacagaattggagaaacagcttctaacagtgggaagactctcagtacaaccaagctattccttacctttctgatttctgaacttttttccatgtgayacctgctgctttgaaggcactaaaataacagaagcagatagagcagaaatcctcactcagatcttcctccttcctacctgtataacagtttgtggcttgccttgtctgttttgtgygtttcgttacgcgtatgtgagtatgtgcacgtgatttccagaaaggagaagcgcacgatactgcccgtgctctgtgactcctgagtgcaygcttcctctgcatttgggctcctaggtcggcctcgtcctgtggacgttgccccttgtttcgtgccatccacacattcctgatgccccsctgctctactctttctccagagtactttttccaaacatgtgatttgcacatttgttatgtttattgtttgttttccacttctagaagtgtgccrctaggcaggaatgtttgatttsttcactgatgatcccagatctctagaaccctgccttgcctgtagagggtgcttggtaaatgtgctctgaatgaatggctccatgatcctcgtttctaagagctagcackatttctcactyagtcctggttggacacaggttccctggaacagtgctgtygtggttatcttctcacgtgtctttgtttctgaacttgaaacgcttttgagttttttattgtttttgttcttcctcattagtttgagtcccttgcagataggctttcattttgtccagtcacctgttcagggagccctgagggccttggcccatgtctgcaggtaactggtttttttatttttatttttttattttgagatgaagtctcgctctgtcaccaggctggagtgcagcggtgcgatctcagctcactgcaacctccgcctcctgcgttcaagcgattctcctgcctcagccttccgagtarctgggactataggcacgtgccaccacgcccggctaattttttgtatttttagtagagacggggtttcaccatrttagccaggatggtctcgatctcctgacctcgtgatccgcctgcctgggcctcccaaagtgctgggattacaggtgtgagccaccgcgcccagccctgcaggtaactgttaatgtaggaagtgctgcctctgggcaccttggccccagggttcattagcagttgcccctggtgggtttttgttggctgtgatgagaagtgcttctgttccccctccaccacactcctgcaactgtttaaacagtggctgtgaccccctgagatgatccagggtttcaaggcgtgcacatgtctgtgtttcggttttcagaagtatcaccttggggtgactctcaacytacatggattttcaaagatttattcaatrtgtttttcagaaagtgttgtgaagagcgaagacttttcgctcccagcttatatggatcggcgtgaccaccccttgccggaggtggcccatgtcaagcacctgtctgccagccagaaggcaytgaaggagaaggagaaggcctcctggagcagcctctccatggaygagaaagtcgagtgtgggtattgaagggacccacaggcgcgcccagcagctctcggaagcgtgtgtgtgacagagcctctgctcacttctgggcctactgtctagagagcagtcttgcacaggagggttgctctgctgggtttcggggtcactgtgccagggccccagtttatgtgctcaccagtcacttagctctgccagctgacaggatcttttgctrggcccccttctctgtgctgagtggaggtagcctctcagcatatctgctgggtaagacatagttaactgtaaattattgaaagaaactcagcaaaatgcatagtgtttggtatgaaaggggcagaaaaataacaagattaaatagaccctaatactgtaattcaagtaagaaataattttgcagttttaatttgcacctgaagcgaactgtatgcattttcttcyttccttgccctgtcacatgcctgcgtgggcacgtgtgtgcacgtaygtgcgtgaacatgatgtggcctggsttggtgtatccttcagctctgtgtttcctccttcacaagtgtggttttggggagaagtggttgaatgttgcagaggagggagctgctgacctttgtgcctgtaaatggctgtcctctctgcccccagtgtatcgcattaagttcaaggagagctttgctgagatgaacaggggctcgaacgagtggaagacggttgtgggcggtgccatgttcttcatcggtttcaccgcgctcgytatcatgtggcagaagcactatggtgagtagagagggaggaaggcatgggcgcctggaytggggctccagcctgcagtgcccattggtgggctgtsggggacctccataccttgaggctatgagatagggactgcattccagagttcatctcaggattgtttccaggccttggtgacctggagaactgaagtcgtgggaggttagtttataagccagcatctgattattcatagccatgcttgttgggtggtgaaataccytaactactttgtacagcacaccacgttttcagtagcaatttatgtgctcaccagtcacttagcraaagatgacttcgtgaaggttcgagcaaggataaggggactcattcattkaatgactgtctsgactgttgtgaggactgcatctcaacagccagcatctgggggtcccgacctgatagtttgtgtgtgggcattgccgggttgctcgctcgtggtaatgactcttccccgaggttctttctgtccaggcagaacaggcatttttscattctgaataggtatattctcgtacttttggtttgaatgtggatgtgggttaataacgacccgaatctatttgatcttccaggtcaccttgggctctgtttgtcagatcctgttatccatagcctttagagaggaccttctgcttttagcttattttgttgctaactttttacaaacaaagggctaattttaaaatgtcagtgttgtcagtggtcagaaaccgtgtgtttgagcgggtgttgagtggcaggtggctctgctgacctggtggctggtgtgtcgggaggatttaacctgtgtgagggattggcctagaaacaacctgttgagatagtcttgccccataacctgtctcacaccgtagtgtacggccccctcccgcaaagctttgacaaagagtgggtggccaagcagaccaagaggaygctggacatgaaggtgaaccccatccagggcttagcctccaagtgggactacgaaaagaacgagtggaagrrgtgagagatgctggcctgcgcctgcacctgcgcctggctctgtcaccgccatgcaactccatgcctatttactggaaacctgttatgccaaacagttgtaccactgctaataaatgaccagtttacctgaaaccctttgtgatcagttctttaatgatacctaaatgaaagctaattaaaacaataggtttctcccaagggtctggagtaaatatattttgggtgcaaatgaaatggcaaaaatctagtatcttaaattgtataaggggacattatataaaaactgaaaatatagaattccttgatgtaggaaatttgaggtttttggcaagagatctttatataagtaaaatcccattatcgtaggcacaccggcaggagttaccacaaccctttttttttgttttgggagacggagtcttgctcttgtcacccaggctggagtgcagccgcacaatcttgggtcactgccacctccacttctcgggttcaagggattctcctgcctcagcctcccaaggagctgggattacaggtgcctaccaccacgaccagctaatttttgtattttttagtagagacggggtatcaccatgttgtccaggctggtcttgaactcctgacctcaggtgatctgcccgccttggcctcccaaagtgctgggataacaggtgtgagccagtgtgcccggcctatgaaccacttttcttctgggactgtccctccctccctgcagttttctttttcttttttttttttttttttaytgatcattcttgggtgtttctcgcagagggggatttggcagggtcataggacaatagtggagggaaggtcagcagataagtgaacaaaggtctctggttttcctaggcagaggaccctgtggccttccgcagtgtttgtgtccctgggtacttgagattagggagtggtgatgactcttaacgagcatgctgccttcaagcatctgtttaacaaagcacatcttgcaccgcccttaatccatttaaccctgagtggacacagcacatgtttcagagagcgcagggttgggggtaaggtcatagatcaacaggatcccaaggcagaagaatttttcttagtacagaacaaaatgaaaagtctcccatgtctacttctttctacacagacacagcaaccatccgatttctcaatcttttccccacctttcccccttttctattccacaaaaccgccgttgtcatcatggcccgttctcaatgagctgttgggtacccctcccagacggggtggtggctgggcagaggggctcctcacttcccagtaggggcggccgggcagaggcacccctcacctcccggacggggcggctgctgggcggagatgctcctcacttcccagacggggtggctgccgggcggagggtctcctcacttctcagacggggcggccgggcagagatgctcctcacctcccagacggggtcgcggccgggcagagacgttcctcacctcccagacagggcggcggggcagaggcactccccacatctcagacgatgggcggccgggcagagatgctcctcacttcctagatgggatggcggccgggcagagacgctcctcactttccagactgggcagccaggcagaggggctcctcgcatcccagacgatgggcggccaggcagagatgctcctcacttcccagatggggtggcggccgggcagaggctgcaatctcggcactttgggaggccaaggcaggcggctgggaggtggaggttgtagcgagccgagatcacgccactgcactccagcctgggcaccattgagcactgagtgaacgagactccgtctgcaatcccggcacctcgggaggccgaggctggcggatcactcgcggttaggagctggagaccagcccggccaacacagtgaaaccccatctccaccaaaaaaatacgaaaaccagtcaggcgtggcggcgcgcgcctgcaatcgcaggcactcggcaggctgaggcaggagaatcaggcagggaggttgcagtgagctgagatcgaagcagtacagtccagcttcggctcggcatcagagggagaccgtggaaagagagggagagggagaccatggaaagagagggaaagggagagggagggggagggagggagagggagaggaccctgcagttttcatgttggctagggtgggcggccaccagttcagggaggacagccccactctgaggtctgactgaggtgtgggtgctggccccgtctcccttggactgcttgtggcctgctcagctccctggctactcacaactctttgatctaaaaagtagtcacaaggccagtgtcaaagcggtggtcttacgagcatcatcctggccctggcaagctctctccaggactcatcctgttacctgtcccacccaagcaccagttcccaaactggagaccctgtctggagaagagaacaaatctgcagcctgtgtgctgagagtagcagagatggttggcagagaggggtttcctgccagcactgggggataggaatgaggcaaggggagagaatggccccggagaagcacagctgtagccaggaagggaaaggggacccttagatcttgcccagaggaaatacatgggacaaagaccttggctggctggaaggtttgggctcagttcaaaatcaagagcaggtcaaatacaccccaatcgagcaccttccagtgctgtagaaacgcccttgatcccttgttctcgaaggaccagctgagcccccygggagagtgggatgcagggggctacagggccttgtggagtcttgccgtgaggactcgtgtgaaccccttggtggtttaactacaaaagcccacactgccctctgggggatgccattttcagttccttgcccgagggtgggctcctgggggtggtaggggaagctgaagtagttgaccccggccccactggtccctgaccctttgcctggctctggtggagccgcctgccctgggccaggcagcaggccaggctcatcatcgcctgcatctccctcaggagaggccgagaggaaggagctgtcaccccaggatgaaggcagaggtgtctgtggaatcgagcctgctgtacaagccctctacttttagccttgagtgagtccttgagaagtccggctcttcctggcctttccctcctactgcttaggaagctgtgctcttgaccttgctaagagaactgccatttttccattggattcagattccaaaacgtggctgtccatcctgattttgtcctcacgcttaaaaaaataaaaatccctttttactgccattttagtgggaatttgggaggccgcaggggttcatggctggattcagcccatgatccttcactggtcacccgcatgccatggggacgtgatgctgacctgaccccaggtgctyaytttcccaggctcacagggaggcagaccacaagtaaaacaaatacacagagaagtagaggatccagcagggtggagggagggggcacagggagaaaaggttatgggtgggggttggttgggcagatgtcactgaagaggtgacatttcggctgagacttgaagatgagccgagccactcacgctgaaacctgaggggaggtcgggctggcaggtggacacagcaccaagcctgcacagcaggcatgacgctggaggcagaacagggcttggtgtgttcaaaggacagcaagacggccaccaggcagaagcactgtgggaggaggcagggtgggggtgtggcaggggtgctcagatgccagggcacatggactgcggcccacaagaagaggaggactgagctctttctgagtgtgtgtgtgcggggtctcatttcacccctggactgcccctcccagggtgctcagggaaaatattgaggctccttaacgaggcaggaggactttgagcaagatgagcccttgggacaaccccaacttagctcactggaggctggagagggccctgtctccccacgccggggcctcaagggaagatgcctcagagatgaggctcctcacccgtccagggcctgcatctccacgtggggccatcacagagacctcaccccccagcctaaccttgaagctccttggaatttaagatacactgtgtccctctttgtcactcttcttccttctctgctcatcttcctcccagttggcagttttctactctccagaatttaaaaattcacggccaggcgtggtggcttgagcctgcagtcccagctacttgtgaggcttaggcgggaggattgcttgaggccagcagttttttttgtttttttgtttttgagatggagtctcactgttgcccaggctggagtgcagtggtgtgatctcagctcaccgcagcctccacctcctgggttcaagcaattctcctgctttagcctcctgagtagctgggattacaggcacacaccaccacacctggctaatttttgtatttttagtagaggtggggtttcgccatgttggctaggctggtctcgaactcctgacctaaggtgatccacctgcctcggcctctcaaagtgctgggattacaggcgtgagccactgcacccagctgagggcagcagttttgagaccagcctgggcaacatagcaagaccctgtctcttaaaaaaaaaaactgcttataaaaaaatcattacctatatagggcaggacagcagcagacacattaaaagacatcttagaagctggaagataagggagcagtggtttcctctagattaatagtaccagctaagcttttaaccaagaggagggaaaaaatgaagagtgtctaccaccaccaagcccttgctgagaagagtgctgaaagatgtggctcaggaagaagaaaactgctcaaagaggagtgagatgccaggagaaatggtaggcaaaggaactgaaaaccatgaacgcaaagccactcaagcactggctgaatacagcagtaaaaataatggtgggcaatttggtttaaaaagcaaagaggagggggttccgggaagatggtggcagagtgtttgaatttccctgaatccccatgtaaagacagagtaactagatagcaaaaccataaacccaatggacaatactaggtgagagagtcccacgaacccctcacgatctgcggaatacaaatgcgtggggacaagtcacctgcgccacagcccgacacagcatctgctttggtgcagcaggacgcggagggaagcaaagggacggcgggtggacctgggacacagcagcggggcactcactgggaagcacagcgaccctcctgtgacgctgagaggccgccccgtgcagaagcaggcgattgtggggcttctcagtgggtcccgaaggggctggagcgctctctatacccactctcccaggctaccgtccccgggcagggatccacactgcagagaaactgccggcagtggaaagggactgaccaggacaggcaaagaaagtacaggcaagatccagattctcgtggggaaagtgtagagagcccgaaatcccagaggccaggtccatgcttttgaacctcaaaagaaaacaaccccagcgggagctcttgggagtaggaaagttttcctgagccccgcctccttccagaaatgcaggaaaatgagtttgggctgcagtgaagaatctgcgctgtaacggattaaaatcccggggtggagagacagacaaagcggcaggagagcatgggcagggctcagaacgagagcaggggacacgagctggggccgtggagaaggaaccatcgcagagggacggaggcatggcatggcccgggccacatgggtttctattccgcgtgaacaggtctgtgcagacccatccacaaaggctgagggagcccagaggccgaagaaagaggctgacaaattcagtttctcagaaataataaacataatttttttttttaagatacaggatctccatctgtcccccaggctggaatgcagtggtgcaatcatagctaactgcagcctcgacctcctggactcaggcgatcctcccgcctcaggtagctgagtagctgggactacagccatgtgccaccagacccagctaatctaaaatttttgtgtgcagy

SEQ ID NO: 93639 - DNA, 39307 bp, Homo sapiens
  misc_feature (1)...(39307): n = A,T,C or G
tatgtagtttgatcttctctccggcaaagagagggagaagactgatgcggctttctttacgcccctcgaaagcttggcagagtgccttccacagagaggctcaataaacagttgtgttttgattcatggactgcaaagctggacatgagcagtgtggcatgaggaaatctcaccagagcagccgtgtgaatgggagcgagccaagtcatctttctgggccactatttcctcatctgtaaaaagaaggggctggactcaatgattgctaaggtcacttcccagctctgtaaattccatgcttttaaaaaatgctcggatcctgaaagaagaccatcttcttgggtttgcagacgaaacagcccggggtgtatttatgtttgacctcctaccacattctgactttctactctaatgaatcctggtttattcttcactgaaacggctcggctccaggagcccttggtgtgattctaacacagtgtagatatcgatttttcttgcaggttagtggttactgtaaccaccacactattagatctctctcattctcttagggatgatttcatgagggccgttccactccctttggttgatatttaactcaatccagggctaatttgaagatagcattactaggatcatgcttcatggctgagagctccctaccttgtatcacttcaagttgtctatcaaacactgcagcagacagaggttcatcagaaatggggcctttggagaactctggcctcggtactgccttgttgctctctgtcagctcttgaatcaaagctttgaattgcttactgtgaacagtgtcaacagtcattcacataggatagggttcctcccttattttgtttgctcctgactgtggaagatgactttttccctcatggcattaacaacagattgttgtcgtggtaggatcacaggtgttatcttcaatatacacatacatggtgtgccacaatactaaaatattaatttgattcgcgccttctcctttcagaggttcacacccagtgagctttccagttagctgagggaaggcgcaacacgtcaggcaggttatgatggccattagctcccaactacaatttcacagggactttcatttacaatggttcttaggcattcaccttgctacaccagttaaaatacacactgcaaaatgagtggtgactctgatgtcaataaagaattctatatccagaaccgtaataccttgttgattaccctttaggaggttccttggtgaccccagcgtagagggtgtaatttaatgaaatcattaacatttctataaagccaacaatctgatacattctcttcaggttaggcactttcacagaatagcgtaagtgactgttccacatgaagcattatcttttcttgtacaacactgaaagcttacatgctgcttgacaaatgtgaattttaaaaagtaagaatgattggcacttggtaacttacacagaaatagaaagtggtacgagaaaattgcccatttcttttagatttaatatgtttttttttcttttaagaagcaataagacatgtaatttccatccacttcaaccagttgtgtatgaaagaggctacaagttcagctctgtagaagcaaagaagtcatggggagaggcatcacaccaggaaagaggagacagccttcccctccgccttcagctctgctgtacgagagatggtcattttcaggccaagccccaaatcctaggactgagatccatgcctccttaaaatgatactgttcactcttgtttccctgacccaccagccccaatgtctcacttatcaaatgtctctccaggtctatgaattgcaaggagaaaaaggaggcggatagggaagtagaaccagagttcacagacaaagacttctctctatgagttagatgctccaaacaatttggcatagaacaatgattttctattaactcatttatttagtcaacaaatatttattaataaaaaacagcaaaacacccagctttgtgcatatgccatgttaacatttccttattgatcttcattgaaaaaaaaatttttttttttttgagatggggtctccctctgtcactcaagctggagtgcagtggtgcagtcacagctcactacagcctcaaccttctaggctcgagcaatcttccctcctcagcctcctgagcagctgggactacaggcatgcaccaccatgcttggctcatttaaaacttttttttttttttttttttgcagagactgggtcttgcatagcccaggctggtctcaaattcctgggctcaagcgatcctcccaccttggcctgccactttgctgggattacaggagtgagttcattacaacaaacccggcccttcattgtaattttgaagatgtataatgacaaagtaattggtggcttcaactcataacaaaaacgctgtttagggatcctgattttttttctgataggagtgctctgtcatgtcaatttgcagtctgtatgcccttcatggaacacaaacaactgacctcatgctctaacatacatacgaaaatgtatatacaggttgaatatcccttctccaaaatgcttaggaccagaagtgtttcaggttttggattttttcagatttgggaatatgtgcatatatgtaatgaggtgtcctggggatgggacccaaatctaaacacaatatatatttatgtttaatatacaccttacatacatagcctggaagtagtttgacaggatatttttcataattttgtgcacctatcacatgaggtcaggtgtgaatttcccacttgtgggagtgtcagcactcaaaaagtttcagatcttagagcattttggattttgaattttcaggttagggatgctcaacctgtactgtattgataagaccacatatttatttttttctagaattttcattgtgacttttttgtggtttagcagacttacagtcatcccttacttaagatttaaaaagagttttctctagtttgcactttagcatggaaacataaacaattattcctttgaaaaccagtcaaagtggcactttgcctctaagtgcagttgttatgcaaaggagtttttggtcctgactgacaaccaccaaattaagaacaacaggcagtttataacaacatttactatgttcactgggccagcaataaggttcatttttttctgtgtttatttgcggagaggggaatgtgagggcaagaactggcttatagtatccatcatggtatttacagcacttagcacatagcagggaattaataaaaaatgaatattgttgattttacagagactccaagaatggaagtagcttctcaaggttactcgggttgtaagaagtgggagtagggttcaaagtctggtctgactccaaggccggtgctctttctctcatgacaaacttgatggacagattggccaccttcctgactccttgactctgtttccccagtcacaggtctcatccttaccttggcaggcagaggaggtggaaggaggggcaggtagtatctcggtacggcagacatttgcaaatgccatcaacccctcttctgaggcagccctggaagagtcttaccttgacttctgtttttaatcgggatcccctacctaaggcacactgaaatattaatatattccaggttatgctctagactagacatagatagcacgaaaccccataaacaaaagggccaagacagtagtccttaggaatgtgctgattgggttcaacctgtgtgaggccctcaaggaaggccaatctagatagggctgaacacatacctaacctctgtatctgtagtaggtggagaaagatcctcaattataagcccaaatacaaggtattagcaagagagatttaacacctacagtcacacttggagttacaaggtgttaatgagaaagacataccaaggartatatttctcccccctttggccgcgtggcttcactattggtgtacaatatttgaaacctcaagttgtgaaactctgaaccaggagggtttcctgtattatgaatgatgtcatctttaagatgagggactttcagtgaaatgcgggaacattcagggtaatgtgttttcagcaagcaggagcttgaatttatggcagaggggagtgtgtgagttgaccaaaatggagagtgatgagaagtaactaaattatgtatgacagtctttaccgagcagaggaaggaagaaagcttaatgatgttgtggttgaaggagcagcagcaattggtgatgtatgggttgtaggttggtaagaagagaaatggatctatgaagacccaaagactgtagatgagtgtgacaaagaccaagcggtggatttgggaggaggagggaaaccaggggctcgggatatatgacacattttagcggcaacaagacagccatgtaaagtcaacttgaaattaaaaatcatcatcttaatctatgtggctctttcaagcctgagtcttatcaaggcaaaaaaaaaaaaaaaaaatctatagttaacgatgaagtatttctcccttttgctttcccggcatccaccaagagcartacataatttaattattgaatctacaagctggaccatgagatgaagaatgatgtgtctgctgtagtgagaaattagatagaaccaactgtttactctcatcattcttcctccgttaggctaaattaatatagttaacaagcttttgtttggaatagcagttcaaatctgggatgtgcagatcagaactgrygattattacagtagctgttatttatggagtgctgacagtcccctcaagtcccatgaatgaaacagaaaggggttcttctgtcattctctgtgctagaaccactgtaaggggctagacgtctgcacagggtaacgaagttcatgaaaaccagattaagttgcttggggcatacgactccagaaatgtcactgatggtctttcctattgccctgtttttctcatctttgaaacaactgcaacaaaatgtgcactatataagtgggcgagcattaccaggaggtaacatgcaggtggggtgcctgtgcggtgatacgggtcgagcagggcgcggcaggctttagcaaacacctcaggcccttccgcacaatttgagcagaaactgaaagcctgtcagcgcagccaaatgcaaatctagcttcgaggcactgagctcgaggcacagcgcccccgccggacccagttccctgccccatccagtgtgtgaaactgtgacccagccaccggccaaggtccccacggggacgctgcgacacagcgggctcactccagagacccaaaccaggtctccccacctcccgccccgccagtttcacggcactagattcttggggtcgtcttttaatcacaatctccatagccgtgtctctaagcagttgatggaacacggatggtggggaaaacctcaccaccgccaccaccaccaaaccaagcagcccccgacggtcgtgcagtcaggcccgggagcgcccaactcgcggccacccagcgccacgcgtgacccgggcagcggggcgacctcggggcggtctggcaccgcgggaagtagtttgtgctcgggctctgaacaccgccggccggaccgcgggctgcgtcacggggcacggcagcgctactgcgacgcggacagcctctctgtcgcgtgcgacccgcccccgccgtccctccctccctcccctcagggcttcggtgcccggcagcatgccgtcctgcgaactgcgggcccgggcctgccccccttccgggcatgggcggcccgtccttccccgaattctttcccgaacacgggccggcgcgaagaacaccggccttgcccgaacggcaacccaatgttgccgcggcaaacttgggttaacgcccggcccccttaaacaacgcccctcaaacgttcccaaaccgtttgggcccttggccttcccgcgcgtcnnnnnnnnnnnnnnnnnnnnacttccttccctgagcacggcggcggcggggacgagcaccggcctgcgcgcggagccggcaccggatggtgggcgggggccagccgtgcgggtacgcggcccgcgcgcccctagccaccgccgcgtggcaccgtcccgagcgcgtggcgcggggcgctggctgccgggcgggggcctggggccgcggacgctgggggcgcctcggccgcgctcagcctttagatcggagaatgcgggcggggtgggggcgctcggggtccccgcagtcactccagggtcgatttctcggcgggcgccgcggcctgtgcgaggccgggccccttggagtgccccgggaggtggtgctgggcgtctgaacaccacatcccttcctgcgcccgtgtgtgggttgggaatgccgggtgtaggccctggatcagagctgacggrgttgcgagcggcgtggggtgtgcctgggacggtgaccggatgtgtcttcctgaatcgttgtattcgagctccagttctctctgtttctacagctgggcctcagtcctcacagggctctagtgggcgttcagccacaccaggagaaggcgcccaggggattaacaggacccttccctctcctgctcttccctcgccccccatggctccccctccctcctatttagtaggtacttctccagcaccccacagcgatgatggatgctggccctaaagccaggtgggaaaccaggctgattcagcacctgtcttttcctgttaggggggttgccaggcctctcagatgtggggcagcgtaatcagtgggtgaccgtggttcccagcacccactctccactgcatccttgtcttaggcactgccgccctgcactgtagcagatgcctaaataaagtgtggagcctgaagcagaagttttgggagatgcttgccttcctttagaccacattcctcgcctttctcaagatttctccgtggtacccaccccgtttttgtgttgtcttccttccttgcccttgtttcattccttttgaaagcgaccactcccctgaagtcctaggacccccttcgtgggctctccctgccgtagacagtctctgcttgcccctggtaaactacgttccaaaaaccttgctttaggagtagcacttgacgtttttcatagtttcttctcatgtaattcattactcggagttgataacttctgtcccatctggattattgaggagaaagggaagggaaaaattatctggttaatatcagagttgggaaggcttcagatgttttctttgaatccgtctggcatggatgataatcctgtgtggtttaggttaagttacctaagttctctgagtctgtgtaagatgggatggcactgtctaccttagctaggagtaaggcttgagtgacatgatgtgtataaactttaacaatgtctggaatctatagatgatcaataaatatttcttttttccaccctcctcctgtgctgactccgctttgtaagggagacaggtaaaggacacaacaatttgtaggctggcataaaaaatcctatgagaaagcagtaaatagatgaaatatttgggaacgtgaagctataggtttcaaattcaaacttctgaaataggaaatttcttaagtttttacttaagaccwgagactgtttagggcccatgtgctgtgatttctgattgataaatgtagctgaagttgcccatrtttagagatttaaaggttcagtgtggttgggttgaactggaaaacagacttactaaaatgcttctctcaayttctgttttgtcatgtttttcttctagacccaacatgagtgaagtttcctgcaagaaacgggacgactatttggaatggccagagtattttatggctgtggccttcttatcagcacagagaagcaaagatccaaattcccaggtaaatgaatttcacgggagaatgcttagatactcacaggcaaagagattactgcacatgagcagaaaggggagactcagtggacgcctgtcaacttaaaagtgcagggtcggtctgccttttgtgctgcgtttctacaagcttagttcttcctgtgagacagaaaattgtcacatgccattgttaactgcctcttgtgccccttctgggactgggggtgcactttccttggcttgtgggtgctgccacaaaaaaccaggcaaggagaccgacagctctcagcacctgcagcagctatgcgtctgttttgagttctgcagtccccctggttttattccctgcttccacagcggcagaccagccagttgcaggcaccaagcctttgggcatgtttccttctaggtcggygcctgcatcgtgaattcagaaaacaagattgtcgggattgggtacaatgggatgccaratgggtgcagtgatgacgtgttgccttggagaaggacagcagagaataagctggacaccaaatacccgtacggtagggcaagttttatgtcccattctgcttagtgacatagcctggtgagtgcctaattaagaaagttggtcagaaggcatcatctcccttttgtcatcaacaactggaaagaaaagtatcctactgaactaccccaatttcctggccttgtctcttaarttccaaagagagccacggagagaagcatggtagtggccacacaggctggccctgagatccagggctctgctgcctgtgctgagcctggcaggcttcactggcaacctgctggcctgcaccacaccagwgcactgatagtcggcgtctckgcagagggtcacagccccttgcagagatagctgagggatgtgcatggtgtctctgtgggttcctttttttactacttggaagcagggtcggctaaccaggggctggctcgggctttggtctgatgagaagcaggcttcattcagcccatgtgcctgatgagaacatctggctcaagctcattgctggcaagcaggaatcaaactgtgaactagacatcaggagatggaggatccagttgcttcctccagttacaggggatgctgcaatttcacagtaggctgtggtcagaccaaaagccagaagtgaggctgggcacgatggctcacgcctgtaatcccaacactttgggaggtggagacgggcagatcacctgaggtcaggagttcgagaccagcctagccaacatggtgaaaccccatctctactaaaaatacaaaaattagctgtgcgtggtggcaggtgcctgtaatctcagctactcgggaggctgaggaaggagaatcgcttgaactcaggaggtggaggttgtagtgagccaagactgcgccactgcactccagcctgggtgacagagcaagactctgtctcaaaaaacaaaacaaaaacaaacaaacaaaaaacaaaacaaaaasaaagaaaagaaaaagctagaagtgtagaactgtaaacctttggcttgactgtctctggattttccccttgaaattagggaaggctgcttcttagagtttgttgcctgtctragccccagggaaaattccttcagagattgcctgggagggtccagccatagctttacttttccttgcattccttggagaatatgcaagcaatgctggaaaagaggcaaatcatgctgggtatgcaggttgctgatttttgtaaggttaggccctgtattttatgtctgagaatgaacagactggcgctgttggaagtgaagggagagtaaggccatccaaatgggaaagattgtgycttcaggccaaggcgtgatgtacgacctttcttctttgttgactctcctggtaggttttcytctgggtttttctcatgaagaatccaagtcaacatttagtctaatttatatatttttactaatgttcctggacctcaatcatgttaaataagccccataaatttctttctaaattgcctaggggcaacttytccatgtttgaaagaaaaagttaagaggtacctggagagagaggaggaactgaggactgcaaagcagtctgggtttccaggatgtgaaaagtagtttagggatgaaggggaccgaatcctcagatcctygatttaacctcaccctccctcgtcggagtgggaagagaggatggagttgggggagggtaagactgtcttctcagcacagcttcagagccggtggtagtggatgactaattagaaaaatgcgcggactcagaaactgtcaccctgattttgattctataagcttttgatggtaagaaagaagggaagtgattagttgtttttaagtccatgcaaagataatttttcacagtgcggttcaaagtcccctataaaaatggtgaaagtggagggtckatatgttaaaggtctgcattgaactgtgtgacggccacagtcagtatgtcaccgagtctgggcagtgaaatattggccctggggctggactttgatatggaggaattctggggggatggcggtccgtcatactcaagctggtgcaaaagatacccgtggttggacagtgcggaggggtcctgggtgagcactgagtgggcctcccaatggggcctgtgccttcttcagtcacccagagcccccagcagatctktaagcagtgacctggaagccaagggccatgcagtacatttgcagcacctgccccacaccccagacttcccagctctcctgacttcccgtgtagctgattttgttggttatgagacactgccttttgtccaaattgaggagagtacctttcagagcccctttctagaaggaatttttttaaaaacctgcataggtatttgtccaacttcaccgattgttttttattgaatagctcctgagctcctgggcactggttgtctgtctgcattattttttattatccatatgatacctctaggttttcaaagctctttgctcttacttatcaattattcatttatatgtagctgtgttagaatgtcgacagttttctttcacgagagtaagcttgtaatttgatgtaccataaaagttgtagaaggtattaaaaggcatttagtattactgccgccataatacagtaaagatgggcttaaagtctaaatgacgatgactgtgtataaactgtacacttgttgtcttctcaaggtttttcaggccacagagaagtaaatgtttggattgcctgggatgtcacagaaatgtttgctgataattgactcaaatgcaaagtctttttttttttttttgcttkcgttttaagattttcaaaattaatttaaaaaataaggggatactgcctggagttggatagctcaacccattctttcctcatctacattaatggtgactgagctgctgtagcaggaagggtaaattcataggttaatccctgtaaaggagctttagagattatctcgagttctggacaatgatttttaactcttttgaatgtacaggaccctcttttaaatgctgaaaaacttccaggacccctgcataatgctaaattcttagtatcttttgagtaagaaactccacaatgacaaaaactacttcgtatcagtaacattttttgttaatctgaactttattaattggatagcatttatgtrtgtttgggaaaagtttatgtatgtcctggacatgggatttatccagttgtggatatgcttggaccccttgcaataccttagtagtgtctcagggttctatgcccacaggatctaagcctcctcctttcttgtaagtaacttctataatgtcacacatgcagggtgacatctcctaattccaaggtcagtgctcttcctgctacctccctgtgtctctcctgtggggcacatgaattcagctgtactgaaatgccaatcattgtctcatttttttttgcagttgatcagactgaggctccgataaaataattactcctcagagatcaggagctcggggaggggtggcctgtgtccggcatcatgcagaaagccacatgcgtggctcactgtaacatttcttcaaaggggagtgcagtggactgaatgtgtctccccccaaattcacatgttgaaaccctaattccaatgygctgatatttggaggtggggcctggggggacgtaattaggccatgagggtggagctctcctgaatgggattagtgcccttctaaaagggaccccagggagctcagttactctttttccatgtgcaaggataggmggagaagatggctatctgcaaccctgaaaggagaccttgccagaatctaaccatgctggtgtcctgacttccagcctccagaaccatgagaaataaatgtccattgtttctcagccacccagtctatgggactttgttatagcagccccaagggactgtgacagggagcttgagaactgtgtaaatttgagtttaccaaataacatacagcttaatactgctttattaattccgtaagtcggaagtcattagtcctgattgatgccttgtggggaggagggaaacacacactacttgtaacataataggaagatggagcttttcctgggctgtgtctctagagagttatttttaaagggtgtttttgttcttccagtcttgggatcaaaacttcataaaactattttattataatgtagtattaatgtggaaaatgaaaattccctctgctaaagaagctttttattccatccttttcctgaaaaatccaaaagataatatgatgtcagtaacattaagtggcaggaagaaggcaatgttattatactaagaatcttttcagatgaatgacaattaaaaaagaggaagcagcagatttatctaatttacaagattaaaaaacttgggaagatttttattttcatgagggggtgggttgctaaaccygtgatgaagtattcagttgacwtttttcattcctttttctttgtggaattcattatagtgaagcacatttaatcaaaataccaatgttatcaaatgaggtaaaatactcttggtgattcagatatcactctttccttgggttttcgtaaccgattttgatgatatagtttacaaattagagagttggagaattaacttgttcccgttgttaaacttaagggaatttttagtaatgcttgccacatgtatccagctgcccagcacttgtggccttgctgatttctgctggcaaagggctctgggttttggtgagtgcctctgtgcttggcctcctatcccacccaatggaccagggagccagggttgcttggcctgctgcatctcactgcaccagggagggaaccgtagcatctcagtgtccccaagagtcgggggaggcctcactctgagtgcgttgggtagaagtggggctcttacccgagtcagttcctatgtctacagggatactctaaaaaggatgtaatgctgggaaggaaaatgctgaaaaacctggaattaattaaggcgaaagagttcagcagagcatcttaaacacctttgccagtgtggggcagtgcctctttaaattctctatttaaatttcatctttatttttcagacttagcatattgttaagcatgcatagatgtcacttttgtgattacttagccatttactttacccccttgaacactgacattttcctgactgccatgcacgtgatatatttctttggcatctgaaaggttagtgttgagaaactaatttatcaagaagttaggaggctgatccttcttaagatatgacttcctcacaacttgtaagagcttcttagtaattaagatcaaatttgttctttccgtcctgaaattgaatgtcctctggtttcgttastcagtccatgaatttgataacttgctgtttcttttcctgcagaatttaatttcacttaaagcttcctgccgctcctcccctgcctggccttctactagttgtggcccgacagcaggtctaattagggacttttgtacaaaactactgttataatcaatggaaaacctttgaacaactgcatagaaaagaaattaagtagattatttttacgaatcaaggggcaaactcagctgtgatcgtgtggggtttyagataaacagagggacacaccagtgtatatatgagtcttctcccacccactaaaatcaaccagctccatgtaagcatgttttactttaagatataattgtttataaacagttttcagaaaggaataaataatgatattttaatataatttattttgatatttatgtatttttatagttacagagttaattatttttaaagtgctagartttactatttcattatgaatatctatgaaagacatatagtaacaaaataactccttgttttgaagagcacacatgttaggaaaagctgaaatgtttggggattggacctacccatgaaaatacacatatctgtctcctttctataaaaagtgacttttgagtcagttcacctcgtagaagtttgaaataaaacttaatctaaagtagtggttccagggttcccagaagtgggctgaagtttatctttgtactgtaatctctcaagataaaaggtttgttgaaaaattagtagccttgataaaatgtcaggggcacatgcaaactaatttagaaaacagctatgttaagtatttgagcacattaatgatctgaatgcaaatggatattccttctttatttcttcttcttcttcttcttcttttttttttttttttttttttgagacagagtcttgctctgtcacccaggctggagtgcagtggcacaatcttggctcactgcagcctccacctccaggtttcaagcgattctcctgcttcagcctcggagtagctgtgtgattacaggcacgtgccaccacgcctggttaatttttgtatttttagtagagatggggtttcaccatgttggycaggctggtctcaaactcctgacctcaggtgatccacccgcctcagcctcccaaagtcctgggattacaggcttgagtcactgtgcccggccacttctttatttctttaactttgctaagtctttgcttagaaacacagggattgctgtacagtgtggttacctgagaatgattactctcatagtcttgattctggtgatctgttctatgtcagttgtgctgattttgactgatcttctctgaaattggctgaaatgactaaagctttattgtattttgagttttttttaatccggaatctcccttcaggagttttgttaataccagctatattaaagtagaatatgaatatattgtttgctcccagaaatacacaataaaacctagttcttagagatttttgcaaatgtttgtattgctttttacttttacttcctgaagactttttttttttwaatctggatagggatatgcatgtctgtaatacacacattagctaagtaaagccccatagtgcttaaaacaacaattgccatattcacacgaaagaatcctggagccgccgtaaggagccaagggttccaggtttggtatgttcatgcccagtgactgtggggytgttagaggcatcacctgacatttatttctcaatatctctatgaagtaaattatcactgaagattcttccagttctcttattccaaggaaaaatataagtattatagctttgatggcattagattagtatctttttctcagcttacggagttctgaaagcgttctcggtcaaatcagagctgtaaaaagctgttggaggcaatgccacagggagaatgtgcatgtgtacatatggataaattaatagaaacaggcgcctttccctccctcctctaacgattaaagactggcgcagttctaagatgaatatagaccatatggagataggatgcatgaataggaggggacagtcagactgtaggttactccacagacatgcagattaaaagacattggatgagaaaaggttggataacagcaataaagaaaaagatcctagctgagtatggagtgcacgcctgtaatcccagcacgttgggaagccgaggcaggtggatcgttcgagttcaagagttcaagaccagcctgggcaacatggcgaaatcccgtctctacagaaaatacaaaaattagccgggtgttgtggcgtgcagctgtagccccagctactccagggaggctgaggtgggaggattgcttgagctcgggaggccaaggcagcagtgagccaagattgcaccactgaactccatcccagacgacagaatgagagaccctgtctcaaaaaaattaagaaaaagatcctatgtctaagtgaaagaaaatgtatgattacatgggacacgctgaaaactctttgaaagagacaagaggttaagaccaaatagaaagaaaggactttagaaattctttagagaacaagtcagcatgacaatatttattcaaacagagatacttgcttgacattgggaaatccctgtgataaatgcaggatactggtgaaggcaagagagttgcaatgcaagggaatgggygctccccttgctgatgctgtctgaagggtcggtgccaaccaattagtggaggtgtaaattttctctgtgcttctttcaaatgatagatgccatagtaaatttaaaatattgaatatgataactgagcatgaattttttaattctgcaattaaaakactttgttcaaaatgccattaattttgagtttaggtgaataaagggaagcagaattcttctgtcatttttccttctccatgtgagttatcactttttaggaattaaaataagtactaacgagtcacctgttctcttaccagtttcagttgtctgctggtgatggggatgatctctggagtcatctttctttctttttaaaatcctaactctattttataatgcgttggagtttttcagacaccatcayatgtggtcatttgttcattcagcagacacttctagggcatttattatgtgttttacatgccgggcactctgcagaggtcaacagaatgccatgggagggtctctgtttttgaagagtttgcagacyarttgtggaggaggtagacattaatgaaacaaacagatatgattgaatattcctttctgaggcagtcactttttttttcttttttaatgagatagggaccagaccccgaatctgccagccccttgatctyggacgtcccagcctccagagctgtgagaaatacatttctgatgtttagaagctacaaatttatgatatttgttagagcagcccaaacaaactaggacaggttgtgtgtatgaactggattgttctggggcaagagtggaaacagcgactcgccagccgggaggtgacgtggtgtacgatgcgagggccttggagggggtgggtgctggggctggagaggcctggctggagatggggtgtattttaggggcagcatcaggaagatggcrtgataaagggtggaagaggtagattgactccccccaaatggttctggttgcagtagctagacaggcatgctgaggaggagaagcaagattttggaatgatcaaggaagatttagacacctgaaggctgaggtgcccatgagcgctccctgcaaagggttgggtggtcaggtgggtgtatgagttggggattagtcccgactggctgtagcagtacaggtatgtcagtgccagcgacctgggtggctgatgaagggagcatgtgcagaggcagtaggagtagctgtggctgagccctgagggctccagcgcttaaggtggttggagaaagaagggcccrtgagaaggagcacacagagcagtgytttaagaaagaaggcctcattttgggaggccgaggcggggrgatcatgaggtcaagagatcgagaccatcctggccaacatggtgaaaccccgtctctactaaaaatacaaaaattagctgggcgtgttggtgcrtgcctgtagtcccagctacttgggaggctgaggcaggagaattgcttgaamctgggaggcggaggttgcagtgagccgagatcgcgccattgcactccagcctggcaacagagtgagactttgtctaaaaaaaaaaaaaaaaaaaaaagaaggcgggcttgtcagctgtatcggaggctgccaagaggcctaagattaaaagtgttcatggggttcagcaacgtggaggtcagaggtgatattgccaagtacagtttcagccaagtacagtttcagcggagcaatagggttgsaagccacattggagccwcttgaaggagaacagagggtgagacaatggggacagctttatttagatcrggctttgggatgtgtggctgagaagagagcagagaagtggggtggtggctggaatggagataaggccacgggaaaggattgcattgtttgtaggataggagaatctggttttggctttggtttttgcttttctgtagcagacatttgtttgttgatgggaatagtccaagacagagagagtgagatagagatttctggaacagaggcaaggtgctcaaggctgtgaggatyggtctctcagacaccctggttgataataagaggaaggactgagaggggaggtgggaggacagcagacacagggtcctggagcgaaaggcagagtgtgatcagttgcaccattccggtggaggaagcagggtcatcggttgagagagctgggagttggagcttggaygccgggagaagagaagagctgattgtgtggggtgggagaagaatgtcctaggaatgtagggcagtgtcaggagctcacatcttatctgagaatctcgagttgggcggttgcttcccattttctacctgcagacccaggatcagtgcgctgcctgaggcaggccagggakagctggaattaattagaacacacatcccagctcctcttccagtgcccagtgctcaggcccggttcccctctaaacgctattaacacacaaaggaggcttttaagctccatcacagtactatcagcgctgattagcgctctgtttctcttggtgctgttgtcacgcattttaggcatcacgtgtgcatttcacatgaacagtgggaagggagttggcatggcctacygtggatgcagtacagctatttccacatcctcctcctcctgacctgattgtgtgcccttagcccatagggaggcagtgtaattagagttctgggggctttattaccaataatggccttaccacagtcagaaatctctttagccctgagcactaccattggggctaagtggctcccctgggtgccgtgagttgtcatccgcagctttassaagaggcattgaggaagggggcagggatggggagcagagtgggagagagggaaaaagaaatgggtattctcacaggcaggctggattgggcaggccaggacagcctggtctcaggtgggcacacgtgggagaggatgggaagcactcacatgtagcaagtagcttgtctgtgctgtgctcttgacagatgttagtctttctaaccgttcttggagagggacttttctctctrtttcttaggtccggaggctgaggctgaagaagatgcttgactggtaggttgtggacagtgtgtgaggacatggtagggaggaagcagagaagacaggcagaaccaggggtctccaagacccctgagtgcattgttgcaggagcggagacggaagttcttgcctcagctttcagggccctgggctgtgggcaggcggatgggcaccctgggtgtggaggcttccctcagagcctgcaggatgggctgccttttacgtgagtgacccaccactttctccccagaccttggtagaattcctttgcgctgtcattttcttctagcagagccctcctctctgggcacagggtggaaacagaacagagcccacacattttccacgcatgcggcgggtttctccacatcacccccgtttctcgtctttattttcacacacagacttacactgtcatgcctatcaggtggaatcatgtgtccctccatggcgggagggctcagttactttatcttctgagtagaaaggccacactctgcctggggctgggctgggggcaggagtgtctggatgccaaggacaggtaggctgtcgggtgcagcgtgatcggggaggcagaagcgctgtcacttgttgtctctgatcaggaagacctggttcctgccagccagtgtctttcttaggaaacaggtcctgttctgagtactggtgacaaagtccccatttgcagagttctttggagttcacacagcattttcctactgtgtccctcacttgctgttcgtgtgaccctgtgagatgggaaggggcgggtgtcgttattcctattcgtagctgagagaggctggaacttgaacagggtattacctttgtgtaggcacatcctaggatttaaatccctttgtcctgaaaaaacatttgtaatccacatacatttttctacagaaacaatgttacttgaagattcagttccccttgcacctgcgagcagtgcctagaacccycgttttctggattttctcagcactccttcagcagtcctactgtgttgctttagcttgcactcgggcygctgctgatttccatgctggggcatcgcagcccagctggtgtgagctctgcagggaccagacccacctccatcccgcagcccacacacccagccctgttagctctccacccagtgcaggccagtttgcaaccagaacttaccagaacatacctgggaaactgcgaaagttttaaactgttttattttcttgctccagtcctgttactaagggctgctcccctgggtgggggacagggctctgtctgagcaggcttagagggacataggctttggagcagtccagcaggctggcaggaggaagacagggccttagccaggagaggggcggggagcaagaggggcttgtctggtggaactatcttagagaagtgatayctgttgatttctatatggtgctcccttccccagttccacctttatttcaaatcatttgaaaaccttgataatgagccagattgctgctttactaataggaacttcatgcaggagagataagatagagaggtgacattatttgggaccaaattctagaaatctttgctttagattttggggaagccataattgggaacacttcataagcttttgggagagtgtacttggtgggggttgtggggggcttaactgtcgcggctaytccgttgttaaattattgacgtgcaggatagggactgcggaggctggcagtgacatatgaggccctgtcaggatatctttcaataattaagaaacaagtagttgaaattccattttagttccagaagctgtgaagcagttccataaatggatcagttagaggagtaagtgtgtaccccatccctcagcggaagtttccatcaggcatctgtgggcagtgggggccggggcaggggtgcaggtgctcccagagacaacatgtccaggtttagcaactctgataactataggaccccagaagtaaaagcactcaggccctaacttcaggaagaaatgacaaaaagctttgtcatcagaatggaagtagaaaatcctgtaaattactgagtttttttttttttttttaatgcacaggtcaaccttgaacttgggtatgccatttcatgtcacttgttaattgcagggtgggaacccagtagaaataatagagggtgatgcttcccaccttttcattccagaaggccatgagcagacgcttcttagctcgagtcctgacccttgtcttgtcagtgaacagaactgtccgtgctctgaacggctcagcctggggtggcggcagaaggcgttgcaggtctgttctcagtggcagcaggcactccatgcctggccttctgacccyggtcctagcgggagccaccacaccaggctgccacctgttcaggtcagctttggcagaacaaccckcaggtctaaggacatcgttttctttaaggaaaatcctgtgtcactaaaaatgagggatttttaagcaacctggagagttcagaactagaactagagttcagaactagatcagaaccttcattttcctgactccaaattttctcaggccccagtagttcctgtcacatctccatagcagatgaagatcagttgagggtagaataacactatcactgctaaattatttaggcagcaattagaatttgttcagcattatttagggtttttaaacaaacctatctgagtaaccttataatactaccgtctaaaatagatattgtatcagtcttatatcagatgaggtgaaagtcacatctataaaacgctgaactcttaaatctaaccagggatggaatatatcctgttaatttgtcaaacttctagagaaccgcctacatgagacagtaaggattaatcaagccctactaagagagaatttgaaaaatacagttttctaattatacagtctcttctccatggtccaaggttaatgcagttctgaattctgacagttagtaatagaaaagaaaaaaaaaaaaaccaaagcatatgaattgtcttataattacctgaaacagaaagtctcttctggcaatcaaggccttctaagcattaatctgatattttcarcatttgattcttttccttttaaacaaggttgggaataactggagggttgtgtgtcactctttgtgcttatcaaatatatatgtactgtttgcagatttattttgcttattgcttagctgtagatgtgtaattctaggttgaacattttatctttttttctttttttttttacaatttagactaacttatgaatacttcctagacactgtatctttgaaatacttgatccttattcctactacgaatataaaaactaacaattacttcttggttagttttggttagttgtagctcttgctgcagttcatccaggcaacacaacaaaaatgtgcactctagggaaaggtaaatttattccttcatttattgctgtcaaatatctgtggaatgtttattgtacaggttgagcatgccaaatccaaaaatcaaaatctgaaacttttttttttttctgagatggggtcttgctctgttgcccagactggagtacagtggtgcaaacacagctcactgcagccttgacctcctgggctcaagcagtcctcccacctcagcctcccaagtagctaggactacaggtgcacgccaccatacctggctaagtttttttattttcagtagagatgagctgtcactatgttgcctaagctgttcttgaactcttgagctcaaacgatctcccccacttggcctcccaaagtgctgggattacaggcatgaactactgcacctggcccaaaatctgaaaccttttgcacaccagcatgacacttgaaggaaatgctcatggagcactctggatttcaaatgtttggatttgggatgctcacctggtaagtataatgcaaacattttaaaatctgaaatctgaaacaattctgctcctaagcattttggataagagatatttaacccatagaggaaaggtacatggaagccccagaccacccaaaagaaaaggcctggggagaagatgggcagttatggctagacaccagatttcaggttttacagatggatctggcatctgagaatctatgaacagatggattcttaaggtcagtgactggccgggcgcggtggctcatgcctgtaatcccagcacttttggaggccgaggcaggtggatcacctgaggtcaggagttccagaccagcctggccaacatagcgaaaccctgtytctactaaaaatacaagaatwagctgggcatggtgacgggtgcctgtaatcccagctactcgggaggctgaggcaggagaatcatcgcttgaaactggtaggcagaggttgcagtgagccgagatcacgtcattgcactccagcctggacaacaagagcaaaactccatctaaaaaaaaaaraaaaagaaaaaaaagggcagtgactatgggagaaaaatcaaagaccaatattttaccttgggaagtgcccacaaaggcaggaaaaataaaaggacctacagaaaagtaaagcagaaagagaacacaagtgtatggtggtcctgagaggttttagaatagagaggagtccaaagagagcaggtgaatcaaaaggttccaggccagaagagaccttgggttttcatgatgrcgagaccctcctgtggcctgtggagctggctctcatcaggtcatcagagccaactgygcgcattgcttcccaagtacacgtcatgttgggagtgggagattggctgtgtgaaaaaatgtctacaccacggaaattggcagatatrtggtgacccagcaaacacagttgacacctgaaacatamtttttaggaatagtatttaaccttgtatgcgggatccattctgayctctatccttcccttcttacctatttcattaaaacagaagaaaaagctggtgtaactcattgaactgatttcatgacctgcagtttgaaaaacattattttagagaaaactggggattatgtatgccttacaaagtcagaagacaattattttaaaaataaattatagtaacaattgtagataggatgatttcatcttgaaaggaggaaaaaaagaatcctaaaaggctgacaagatgacctctctagactaaggactaagtatgcatgcttacaggagaagaaaaacgagcagagagaagcgggagccctcagagatggagggaggaaggggctgggagcacggccttgtgtttgcctggggagaggaggccgtgttttgatagtgaaagcttgttttagagaaagtcacctgttctggaggattgaggaatgaaactggaaaccttaggaaaaaagcaaagacatcggatgtacttggtattttttaaattgcttttatttagttagctggaaatgcactttctcagatccactgtcactcctgcaaattacaagagcgctcagccaccctgtcgaaggtcatccggcttccaagcagcaaattggaccttgagccctcgtgctgcccttgttgcaaagctctttgtccacactcgctggcagaggtggagagtacagaggggaggatgcttggcctgtggtggtctggccagccagggcaggcatgagctcgtcacaggccaggcagtcatcgagtgctctttgtggcctgaagtggatttggcaggtgcctgttatttgatcagtgtcgatggccagtcgacacaagtaaatgaatccccaaactttactctgacccacctgctttaaacaaattggaggaagtcatcaagttagtttccctagtttcctctctgaggacagtctgggggctgaggcctggctgagtcctgtctcctcaggacaggcccaaaaggaggtacagggcggcctgggggacagcraggktcagagtttcagggctatggagatcctggagctgatagacgagtgtcagccacaaaggtgaagctggatttcaggaccacaacaggcggcasstgggagttacgaagggggcagggctgggttgcggcctcaggtgctcctctgggttggggcttctctcctcagccccgcaggtgcgggtcgggcaagcctgtgatcataagacagggctgagggggtctggggaagggtacgggaaccagcaagagagaccagggtggggctgatcttacaccctccaccgaacacttgagtttcctgyttgtcagtgtccacttttgcgtatgtgggattttggattgttccttttagagtctcatgtgtacccgacacactactgttcatattgcccagtagctttatatatatgtaaatatatatatatatatatgggtgctaaatatttatcaaatgaataaaggaggaaatgcagattccagttattcatggtgatgttgggaagtactgaaagtcctcttaaattcaaatatcagaaatatgctctcccatctaataaatactttttgatggtgctggtattaatattcagatatgatatatatttaatatttatttttaatattaatattcagatatatatattttttaacaagaagctttacattcttcatcttgtgattttttggttaaaagaaaggaagtctgtttataatgctgtgcattatttctataaatcgccctctgtacacagggatgtcagatgctgcccaagagaatctgtttcatatggtaattttcactaatgaatccagacctatactgttaaattttgccccaaactgcctgggatgaagtagaggaagctcatggcagtgagcgtgacagttcttagaggacgctatcatagtgtttcataacagatgcagaggctctgcagttctgaatattaataccagcaccatccaaaagtatttattagatgggagagcatatttctgatatttgaatttaagaggacttccagtacttccgaacgtcaccatcaataattggaatctgcatttcctcctttattcattcgataaatatttaacacccattatgttcatggcatcacattagactctgggggagttacaaagaacctaggctgggctctgccctcaagggggaaataaaagaaacaattacatgtaattgtttttaacaccaagcagcgtgaaacccagctctggagcagcctggtcacaagggggagaagaggtcacgggagcccctccaaggccagcgcacatgtggccataccttgtgccttcccaagcccgggccctcgcacccttctcttgtctttccttgtcctcccatgccgtcagggtttatgagacctgcaagtctcggggcatggctctggtcactctgggcagcgaagatgattctctgatgggctgtggtcagtgaagcacagcttgtttgcctcttttgattttcctgcaatgccaggagagattgctcagttttaggcaggactgagatctcctaaaacatggaatttgtagacaaaaatgaatacttcctaacatttcctgagagagcttttggtcagccttatgcctgcaacattgcattgctgctgggggacccaggcacacagaggtagctgcagctgcacccgaacacgagagggtggctgaggagagtggccaggccttcatctctctgacccagagtacgtgctcagtaaatgatcatcgatgaagcaagtgagtygggactgaaatgtatgagcgccataagtttaggccactgctcatttaaggcctcagaactcctggaagtgttacrtgtagaaggttggcaggctggagagggtaggggagaccttgaagattcccatatttatattctaggtggcttgtgtgatgtgggccatggccggatgtcattcattaactcgtttgacaaatatttattttagcacttgtgtgcatagcatgtgctgggaataccaggggagccagaaggcagtgcttccggaacttgtctgcacgttggaatcacccggggaattgcttacaaattcaagcccaagccacagcccaggccatcacactctgcaggcacagggcacagatctctgtattttggaagcgcctaagggtgttctgatatcagagaggtttgcaagtcacggctgttaggatttataatagagttttagataacacacccaggaaaattcagtaacgatacaagacggccatccagaaacctcctgggcaggatgagggagtcaaacccaggtgtgtgctgtgggcaccactcattccccctcaaggaggatgtcgcctgtggattagggagcgggagcatctaggcaaactggacctctggggtgtgtgttggctttgccaggttcgagagagggaggaaggggatccccttgactctgaactcaggcaggtccggatgtgacccgggatcatgggtggaatgcactggtctatcaagagctcaactagtcattgccatttaagtggatgaatgtttttcttataaaagacagactgggctgggcatggtggcccacacctgtaatcccacagctttgggaggccaagatgggaagatcacttacggccaggatttcaagaccagcctgggcaacatagtgagactccatctctacaaaagatacaaaaaattagctgggcttggtggcacgtctgtactcccagctacttggaaggctgagttgggaggatcacttgagcccaggagctcgaggctgcagtgagatatgatcatgccgctgcactctgggcaacagaacgagacccagtctggctgctggcgtttttccttgtgcgtatgtgggctgagcacgatgtggtaaagcagatccctcaggatggacacgctcagcttcgtcacttgttgattctcttgctcttaaaatcccctagccctcttaacagccacggtgaacttccccatgtgtgcgtgtcagcacaccaatgagccagctcaggtgggcactttcatgccccagggtcttgtggagccgtgaagcggasstgcgcttagggtggggaaggcacttgacctcggccgtcctggccgctctaggtgccttcaggcctcactgctcatcagcaaccagccagaccacgtgggcctcatttggtattcttaggacttgccatttctaatcaatgtttttacttgagtctgttatatgttatttcagaggggggaatggaatgtgttaacacttagtaaattcttcatgagctgcaaccaaagtttttctttctttccctttcaacccacagtgtgccatgcsgagctgaatgccatcatgaacaaaaattcgaccgatgtgaaaggctgtagtatgtatgtygccttgttcccttgtaatgaatgcgctaagctcatcatccaggcaggtaggaaccgggtctttccatttgtcacatttgcattgctgcctgctcgtcagtagctcattgctgatgtgtttgatcttraattgctattgtttagatctaaattaattgcactatcagctttgcaagatatttcccgtgttttgtttttgaatggtgccaggtattctaagactaattgcatcctctgtgattcttagcatgtttttaatttagtttgcaacttcttaaactgcaagctgccaaaaaacaacacaggcattgcatataattactgtcaatttactgttctctgacatattgtgcatagatttgggggagrgaagaaatgaacttctgtcagaaacaaggtcagctgggagtctgtatatgaaattttaatttgtatctaatacatggtagatatttgaggatctcaacataccttggcatataaatgtcataagacccaaatggcactaccttcaggttttcttattttacggttcccataaatctacaccattgtattctgaatatttcgcctttttcaaactgtcacatctaagattcagctacactttgtctccataaaactctcggctggagatttaaagacttaccatgtttagccaaatgtgtggtttgaaggggccgtttatcaccagtcctgtggatctcagagcagaagcggcctgctggtactgaggagtcgcgtgggctccctggctgtcgccgtcaccgttcctgggaagctctcctcgcggtgcccaggtgtggaggcggtggcaggcctgtgggccgagcagtccgggccccacactgcagcctcctctgccttcagaggctgatggagcagcggccttcagtgcggggcccttgggattcctggctgccgagttagcgctgcctgctgagatcaggacaagaaaacagatctgccctctgtagagctggtttgaagtggtctgcaaagccatgctgggaagcacagtggtgcccacctctgaatttgccagcagcccccactccctccattagtcctcccactagtaagagaagctaccttgtgcatactgccttgattacctgtagtaagggaaattggttaatcggatcaaggcttgactacttgacatgttttccctttgcatttgtttaaaaaaaaaatccataaagactggagggaagattagatagaatccaccctctgctgtattagaaagcagcagatatgtatttcagtgactggacactgtctgcaagcacactcagaaaaggtcattaatcatagacgctgaaagtgctccagctssttccgcctgtcttttgcagcatctgtaggtgcgtacactaagggagctcccattgttaccttacaggtataaaagaagtgattttcatgtctgataaataccatgatagtgacgaggcaactgctgcgaggctcctgtttaatatggccggggtgacattccggtaagyggggagaaygcrggcggggggacggggtagggtgaaggctgatgaagagatgtatttgaccttgtctcctccttgtgatgcctgacttccacacttggaggtgtctttagaaatgcaagggcataagaatttaaagactattataggggtagatatttaagagcagtgacaggaaaatctgaagaccatttgtttaatgattgtactttaatttcagtaactttcyggggtaattagactaattattcaagtactgagaagtttaaacattcacaagttttataataggaaygccaaaccttggtgaattttgcaaatgtaacaactttggcatagaaaatttaggatgaaagtagcctgccagattgaaacattggggattctctctttttttttttgagacggagtctcgctctgtcaccaggctagagtgcagtggtgcgatcctggctcactgcaacctccgcttctcaggttcaagcggttctcctgcctcagcctcccctgccacacccagctaatttttttgtactttcagtagagacrgggtttcaccatgttggccaggatgacctcatgagctgcctgcctcagcctcccaaagtgctgggattacaggtgtgagccacctggggattctttttacagcaacattttgcattgagatttgaagtcttacagatttttatgattatctttgctaagaaatggttgtgagctayattttacttgcaagtaagttcaactacctttrattcatggcagaaaattcctttgggactgtaaagttttccagcgcttcatggtrttggygttcagcagcagtgggaccatggtcataggtgacgtgccctggccccttgtgctggtcattagggatacagctcagtgtatctcatgaactcaaccgtggtgccttctgagactttaaattcaaattatttgtatactctcttgttcagtgattcttaaaagaatttgttttgttcccaaatgtyttctttttaattgttgtagaagaaatgaggaacragtgaaaagttaatgagcaaaaaaaaaaaaaaaaaaagttggtttatgtttgcatttttagaaygtaatttgaaaaattactcctcactaaaggtagtcgttttttgctatatataagcggcaaaagaaaatttactatttttttgcattagagagactccaagttggctgcagaaatttttctagaaaataagataaatctgatgggaaaactagtaatcggatatcatgttgtgcagctgacttgttagaaatcctttgactccccaataattcgtgaactcagagagctgaaaacatacaaaccacaccaccccatgcatctttttttgtcttagtcttttctgctctgtgtttctcttggtatggtgcactataattggctcctatagagagaaaatagcaagtgaatcccaggacatatttttctctgcacagaaaatatgagttaagccaaagtaaacaaattgctttcactactcaccagataataattgtattttgtttttatttttaggaaattcataccgaagtgcagcaagattgtcattgactttgattcaattaacagcagaccgagtcaaaagcttcagtgagttacatctcattcaatctccagaagattgggattatcgtcttctaagaggttgctaatgcctttcatcttgaagttacacataacttcttactagccagtatggcaaaagtaggcatctaaagaatataaagcctcaaatcttccttactgtctctcttgtcacatggaatctacatgtgtttgaactattgctttaggrtttaaaataggggagcctgtggtggcctggtgcacagggctagaacgagrgtgcctccccttcytgtgtcctggctggctgggatgctggtggctcttcagaggagcatcagctgtctgtcatctgctgcgatccggcagcctctcttcactgctacatgtgctggaaggacaaataaataattgtggttgtgttcttaatggggacragcagacacactgatctgaacatctggcccaagtgaagcatggcatatagtgcccttggaagaaaattaggcctcaaatgacagtagcattgaagtrtttgctgcagagttgagggaaacccccagccaccctcccggaatccgagatagggtggcacatctgtcctgacagacgaggagtgtaactgaaccaggaatatttcctccattcctgctctcccactgcacacagggtggtggcacattatccctctggggggtggggacgcctgttgttttggctcaatttgggtttgttggtcacatggagctcttccatttcgtttagctgaataatgagttgttcctagaggagacagcctgtctctccttgttgcccccaaagcccatgccctgccgtggtggcagctggggctgtggatgggaggggtccccaacatggatgtgttgcccctcctccgcatrccaacgcrgttcatgtacaaggcccctctgcaactggakagaaaattaattcctatcccgtgagtggattgtgagaaattccacccacgtggagacagcttactgcagcactgttggtgttcggagctcttctgtgccctggctccatgctttcacctacacaarcatcaccttcctaatcaccgcggggyggggagcgtgtggctstgccccttctctttaatctcatttaatttttattaaacatgctcagtacctgtgttgagaaaaggctttctttatcctaaagattattacctttttaaagtgctcttatattttcatgagtttttattttgtctctgagattttgtattccacattctagggtattctgtaatttggctccttaccaatattattaaaatcttattaaaatctaccctaccaaagcatgtacatttttatgttattataattatatgcttaattttctgctcctgtcctttctgtattgtctccgaagcatattacatatgttttaatgctcaaagaataatttgagatgcccaagctgtgtgcgttccccagggttgatgtctggggctgctttatggatcagatttatgtaaaatgcgaaggcagccgctagccctacgctctctcctgtgtaccctgcccctggtcccaggtgtggccatctatctggtagggcccaggcctctgtcctcccggaaggcttcagtcctgagttctgccctttgctgacttctcaccttatcctctttccaagtctctcttctcttctctcctaaatttccttctcttttctcctccaaactcctcgccctgtgtttgctccaaaatacataaaacaaaaggtatgtggaaaaaagaatcagtagacttaaaggtagaaaattagagatttctctattgccgcaagtcacaagagttgtgagtcctgttaggatggagtgtgtcattttcatcacatcacattgataaatatgtctaggggctgataagccagtagggcatctaatttatgtaattttgatactatcttatatcttgtctggttgttacattcagtttcagtgaaaaaaaattgacttttttctttttctgtctttgaggggaggttgacaggaagggtccttgctaaaaggggagtcctggtactgaggtcagttgtgggtgtttatttgggggcagatgctgtcgctggggggttgtgatgcttccacctatgaaccgaccctggtctcctggtgactggagtgtgagtgattatgtcttcgtttctaggatcactataagaatagtagaattgtcctatccagagaattctgcagatgttcatgttccagttaatagaggtttgctttgaactggtgccttsgggagaagctttccagaaggagggagttttgtgcagtcttttgcctcgcaggcattactagataattgtggtgaagggagactgtatctgagccartgttgctgcctgtcatggctaataaatgacaataaggaaaccatctttcactgaacygttggtagaaggactacatttaaaaggcagaatttgtgagtgaaatgataggaactccatttccctgacacattttctgctttcttcccttttactcttttagcagtctgtccttaaagacttctgaagcctgacaagacccagcagtgaaagtgatctaatatattagccaacttttcctaaattaaaaatgaagcaaaataagagaacaagcatacaaactgagctcatgaatacaaatgtaggcttgcaagcccggtgagctgaagttcctgtggccctggtgtaatttttgatcttccaatgtctgtatctacctgaggattaaaaatatttaggttgttgcaaaagggcctgaggaatgcagggagggagttttctcattggcgaggctgataagaagttttaatatttatagttcacttttgttgttgttgttaaagtaaagccactctaaaaatggtagtttctacaaatcattagccaggaagcctgtctaaagctccagggaaggaccagaactcaaggtgggggtgctttgcaagctctcttgtcagggaaccgtgatgactagagttatggattaccggctgcagaggtgccggcaaaataaccctgggcccaggagtcacatttagagcagggtgccccagaattgttctggagatacctttagctagctcgacttttatttcggaactgttggaagaatctaaagccatttcatcgtgagggtatatgaatctcaaatagttactgagtacctaccaggtattgggttctctgatggctcttgggtgagagttagaacagagtggatagctagatattagacaagttccttagatgaagcccaaacttgccacccgcatccctgagccgtgcaggtgccacctgtactttattttctgtgtgattgggttgtctattattttgtgtctgtatccattggagtaagaccctggggagagggcagggaccagacacgaagtccgcaggagctgggttcttaccctgattccaaggccgaagactttaaaaaattctacaagtcctggccgggtgtggtggctcacacttgtaatcccagcactttgggaggccgaggcaggtggatcacctgaggttgggagttcgtgacccgcctgaccaacatggagaaaccctgcctctactaaaaacacaaaattagccaggtgtggtgtcgtgtgcctgtaatcccagctactcaggagactgaggcaggagaattgcttgaacccgggaggtggaggttgcggtgagccaagatcgcgccattgcactctagcctgagcaacaagagcaaaactctgtctcaaaaaaaaaaaaaaaaaattctacaagtccttcattaaattaaaatgagttcagtatttcccaagaaaatcaggggaagggttctctgttgatgaaagaaaagcacaccgtctgctcaccgctcgggtgtggagcccgagggtctcaggcctggggcctgaagaaaggtagtgcccttatttttggtagccaactgccaatctcttctctggagcccactttacaacttcgcttggctgctgccattcttagccatttttaagatcagtggtattaattacatgcgtgttgtgcagccatcaccaccatccatctccagagctctgcatcttgcaaaactgaatctccatacccattgtacagtaattcggtcttcccccttcccagaaatgacatccaccattctactttctgtatgaatttcaccactctcagtacctcatataagtggaatcgtacagaattttctctttttgactggctacttagcatcatgtcttcaaggtacatccaggttgtagcctgtgtcaggatttccttccatctgaaggccgaagaatcgcccattgtgttcacatactgccttttgtttagccattcacgcaccaatggacacctgggccgctcccatcttctgcagccatcctttcctgaatgtgcagtgtgcctcgccaacctggccccgtctgcctcagccacccagcggccttcctccctgcaccagtcacctaccttgaaggatttttcttttttaaaaatcaacattttttttccttcttttttttgaaacagggtctcactctgtcgctcaggctagagggcagtggcgtgatcatatctcactgcagcctcaacctcctgggctcaagtgatccacccacctcagcctcccaagtagcaggaactatggacatgcatctccacactaattccctggctaattgttatttattttttattttttgtagagacgggatctcactgtgttgcccaagctggtctcaaactcctgggctcatgtgatcctcctgctttggcctcccaaagcgctgggattgcaggcgtgagccactttgcatggcctaaacccagcatttttaagagcctcttcctgtgctccctttgaccatccacagtttccatgcatgtttcaacactgagttggatcccgccctctctgtaaagtctccccagaccttcctgagcttgaagtgattttttcttctttgaaatcctgcagcagttattgtcagcaaccgtctttctggcaatgaatcgtgtactgttttatgatatctcttctactgtctagaactgttactgaaacatgtcatttaacttttcatatgtatcttgtcctgctctaacgaggttggaaactccacagagcgcatgtggcatcctgtgtatcttggtgcctggctaccatttctctccatgtctgcacgggaccctatgcagaggggcttcatacacatttttaatatttccacttaaaagttataaacttgattgcactttaattcagtgaggtagctgagcaggagccaacctcctaaattattttttccatgctgatttctttgtgaatggcttgaaaaaaattgtcatctggaatgtaagagaaagaaatcttcctgttagcagccagggctaatgggcacatttatctttgagagagacaggagattactgtttaaatgtcttatttttgacttctgcgtttcagttaaagcattcttatatatgggtttgaatgaggaatttggcaataacagacactcttggcagaacacccagagacgatgtttccactgaaacccatccgattagtggatttcttgacctttccaggtcttaaatcactgttgaatgctttctgttgtaggagttctgtatgttaacttttgttaatgaaaactgttagaaacttaaacatgccatttggtccaggttttaaatgggcattctgttctggaattgcttcctctgcaggggtgggcatggtgtgcagccttttgatttattctgcctttccccagcctctgaataagtaggcattagtaatgcatgtagctgtaagtaacaggcccctgactctcagtgactaaacaagtagcatatttttcctcacataacaagtacggtggtaagcatttgctggagttgggtcagctggtccatgatgtctgcaaagatctaggtttttttctttatttctgtcttttgctttatatcttcaggcttgttttgtcaaaaacttcaggcatcccattcacactaaatgcaagaaggagatgggtggcagagtggggatgaggcttctctgctcttggctatmcctttgatcagaaaagcagaaactttctcagaagccccagcaagtattctcttccatcccttgggccatagccagtcacatggccacccctagctgcaagggaggctgacagggtccttggcattccacattcgatagaggaggctgcaggggagaaagaggctagtaactgctgtcattcatgctgttggccacaacataccccttgcttggaaaattgtataacagtttaattgtgtaatttctactcagtggttcttcgcatcctcagtgttaaagttgttgttgagttgaaaaatgatacttgcttcataggaattttgtgaccttcacgttgactttcaaactcctgtgcaggaaatcttagtttcttagctggtcacagctatgaaagagtgatatatatacataggcacgcataccacttgagggtcagttacaacatggtctctggcccctaaatactcagcgtttgtttcctaagaatagggacattttcatatccagtatagttaagtatagttattgacaataatatgtttaacatggttagaatattttaatttattattcctatcccaattttgtcagttgacccaatacgtttctttctggtgttttccatatgggatacagtctagagtttggtattgcattttgttgtcatgtctcgttagcccctttaatctggaacattccctgtgctactgcttcttctggagcctctttctcctgctgcctcatgctaacattttttttaaacattttggtctcagggcccctttacactcttaaaaattactgaggaccccaaagaaactttagtttcatgggttatatttatcaatatttacattagaaattaaaactgagaaatttaaaaaatattttaattcatttaaaataccaatagtaaaccctttacatgttaacataaataacatacttttacgaaagaataactattttccagaacaacaaaaaatgtttaatgaaaaaagcagcatcgtgttacatttttgcagctgtttttcgtgtctggcttaatagaaaacagctggattctcatttctgtgtgttttctatctgttgcagtaagttgttttggctgaaatatgtggagaaaatccagccaaacccagatatatagttggaaaggggaggcatattttaatagcattttcagaaaattgtggatagtctttgataccacaccacaatttgatatatgaaagtttcttaaaagcta

SEQ ID NO: 93640 - DNA, 142471 bp, Homo sapiens
cctccccgtccttctcacgtgaatggagtcatacagtacgtatgtgaccttctgagactggcttttccagtcaggaggatgcccttgagggctttctgtgggcatcagtagtttgctgtttgtaaaaattgctgagtagtgtccatggcatgcacctgctgaggtttgtttaatatcatcctttgaagggcattttggtgtttccagatttgggctattccaaataaagctgctgtggacatctgtgtaaaatgctgtatagacatcagttttcattagtcggaggtaaatgcacagggatgcaattgctgggtgctgtggtaagtgtatgtttagtttataagttaaattaattacattttctttgaggcagggtctcattctcttcccaggctggagtgcaggggcacagtcacatcttactgcagcctcaacctcctgggcgctcaaacaatcctcccacctcagccccctgagtagctgggactacaggcaccagccaccatgcccagctaaaagttttttttattaaagttactgccaaactattttccagactggttgcaccattttactttcccacagtgacatatgagaggtccagtttcctcacctccttgctagcatttgatgttgtcagtatttattttagctgctctgataggtgtgtagtggctgtaggattttgacctactctttccactgcctttccgtaatcatctgtttaatccaacacatatttgagggcctgcagttggtacaaaagtgaggtagacagctcctcaccctttaggagtttgctgtctacaagaggaagtaggccaagtaaacagtgctgttcactggagtcggagtgtacaggcattaggttctaggtcagcacctatggttgggaattcttttttttttttttgagacagggtctgtctctgtcccccaggctggtgtggagtggtgcaatctctgcttactgcaatctctgcctcccaggctcaagggatgttcccaccttagcctccgagtagctgggactatagccaccatgcctggctaatttttgtatttattttttaagaatggggtcttgctatgtggcccaggctggtcttgaattcctgagcggaagcaatccacccaccttggcctcccaaagtgctgggattacaggtgtgagccaccatgcccagcctgaaaatcttttatagtgaaaattactcttgaaaattattaatctttgtagagtgataatgagatcataatcttgtacaaaaattccactttttaagggttactgacaaaatgacgtctggaatttgcttcaaagggatggaggggagtctaatcacataagattggccctggggtgggcactcactgacgctgggcgatagctgaaggagactgattgattatatgagtctccctggcttgttgagtttgaaattttctataaaaaggtacttttaaaatccttgaaaatccttcattaggaatcatgttaaagatgctgaaatgatcctgataagacagattttcctgtrgcatcactggttctccagtggacaccaggggaagaagtggctcatggagcagggccacccagcagacgcaccgacctcagcacagaggagcacccaccctgggctgactgtggaaacagaccagatgccaggcagcggtgttgagatgggcagaggtgcagtcaggagcacttcttccctacccatgtgggccrgtcagaacatttgaaagaggcccagcagatgtgggacagcaccccccagttaccagcaacactgaggttggtgtgagattcacatgggcattcttgctcctcctcctagtccagacattggaagggttcattcgaagcagaatctcagacttcaggctgggcgcggtggctcacgcctgtaatcccagcactttgggaggccaaggcgggcggatcatctgaggtcaggagtccaagatcagcctgatcaacgtggtgaaaccccatctctactaaaaacacaaaaattagccgggcatggtagcgcacctataatcccagctactcgggatgctgagacaggagaatcgcttgaacccaggaggtggagaggtggaagctgcagtgagccaagatcacgccattgcactccaacccgggcaacaagagcaagactctgtctcaaaaaaaaaaaaaaaaaaaaaagaatctgagacttcagagcagacttacagaggtcacaaatattgatattaccaattttaaatctttgctaacctgacaggtaaaaacaaaaggttatatcttttttaattgacaaaatttgtaagctttcaaaatggtaaaattgggacattttatgattaaaaatacattctatactgttgcagttcaaatatatgtatgaactatgatagttcatacatatatacgaactgtgaccttgttcacatatatatacacacacacatttgtgtctgggtgtgggtgccttagtctatttgggttgctataacaaaatgccttagcctgggtaatttttggacaacagaaatatatctctcacagctctggaatctgggaagtccaagatcaaggcaccccacattctgcgtctgaggactctgcttcatagatggtgccttcttgctgtgtctccccatggcaggagggacaaacaggctgccttgggcactgatttccttcatgggggtggagcctcatgctataagacttcctaatggcccctcctcttaatacgatcacattggggactaagtttcaaactatgattttggggagacaccaacattcagacaacagtagagtgtttgtatatctttctaaccatctatctgtctatatttaatttatatggcagattttttcaaactgtgagctgagacccattagtggattgtgaaacgtatttagtgctttgcgtctagcattaaaaagaagacgacgacagtgggtgcagtggctcatgcctgtaatcccagcactttgggaggccgaggcaggaggatctcttgagcccaggaatctgagaccagcctgggcaacataatgagacccacctctacaagaagtggggggggggggaaagctggggggttggggggaaagccaggctactggcacacacctggtccagccatttgggacgctgaactgggagaattgcctgagcacaggaggttgaggctgcagttagctgtgatcgcaccacagcactccagcctgggcaatacagtgagaccctgtctcaaaaaaataataataaaataaaataaaaagacagaattttttttaaaaaaaacagtgcattccacatagtaatgacaaatattagttttaaaatttggcttttcccaattaaaaaacgagcaaagggcctgaatttttccaaatagacataaaaacggccaagaggtaatgaaaaggtgctcatcgtcaataaccgtcaaggaaatgcaaaacaaaaccacaatgaaatatcacctcacagtattagcatggctattatccaaaagacaagtgttggtgagggtgtggggaaatagaagcctttgcccatcgttggaggtacagccattatggcaaacagtatggagtttcctcaaaaaaaacaaaactggaactaccacatgactcagcgatccctctgctggttatatatctacaggaaatgaaattgtttcttctggagctcctctcagttcattgcaacattattcataacagcaagatacagaaggaattcctgtcattggctacatgtgtgaacctggaggacatgatgccaagttaaataagcgagacagagagaaagatactgatgagctcacttatacgtggaatccaacagtcaaatcctatctagaaacagagagtagagtggtgcttcctggggctgggaaaaatggggagagatatgtaaaaggaaacacactcgcagttatgtagcataaatatgcccacagatctaatgttcacaggaggactgtttattattattgttattaatttttatttttatttatttattttgagacggagtctccctctgttccccaggctggagtgcagtggcgcgagtggcgcgatctcggctcactgcaagctccgcctcccgggttcacgccattctcctgcctcagcctcccaagtagctgggactacaggcgcctgccactatgcctggctaatttttttggtatttttagtagagacggggtttcactgtgttagccaggatggtctcgatctcctgacctcgtgatctgcccgcctcggcctcccaaagtgctgggattacaggcgtgagccaccgcgcccggcctgtttatttttattttttgagacagagtctcactctgtcacccaggctggagtacagtggcacgatctcagctcattgcaacctccgcctcgcagacacaagcgagtctcttgtctcagcctcccaagcagctagaagtttaagaactttaagtgggggaccacctatacataaacatgccaccatgctcagctaatttttgtacttttagtagagacggggtttccccatgttggcgaggctggtctcaaactcctgacctgaggtgatccacccaccttagcctcccaaagtgctgggattacaggcggcgccaggactgtatttctttttttttttttttttttgagacggagtctctgtgtcgcccaggccggagtgcaataacacgatctcagctcactgcaacctctgcctcctgggttcaagcaattctcctgccttagcctccagagtagcttggactacaggcgtgcaccaccacaccggcctaagttttgtattttattagagatggggtttcaccatgttggccaggctggtctcgaacttttcacttcaggtgatccgcccgccttggcctcccagagtgctgggattaccggcgtgagcgaccgtgctcggccgcaggacgactgtagatgatatcgtattgtgtgttgaaattttgctaagagagtagattttatgtactcttaccacacacacacaaagagggtagtcatttcacaatgtctctatgaaatcatcatgttgcacaccttgtatacaaccaaaaatcaatttttagaaattggtttcaatcgtgtatgatatatatgtatatgcacatgtatatgagatattatgtatacgtatgtgtggatataagacacatgtttatgtataggtggtccccaacttaaaatggctcaacttacaattttttgactttgtgatgggtttattgtagcattaaatacattttcaacttacaatattttcatcttacgatgggtttatcaggacaaagccccatggtaagtccaggagcaaatatttttgcatacacaggtatgtgtacatgatacatatttatatgtattgatgctgtatctatagatgcatatgtgtgctatgtatgaggcaaatctgcgcatgtctgtgtacatggtaaatatttacgtccgtctgtgcgtgtcatagacatagaacaggtgggatgtaaacagacgggctgggcctagctgctcctttcccgcctcactcgagtctggcaccagattggccgctcccagcccgctccgggtgccggcccctgcaccccaccctgcaccccgcaccctgccctgcaccccatcccggcccgtgcctcgcactccacctttcccgcaccctgccccgcacccaacacctcccgcgcccctcgccgcgctcccccagcacgcaccaggccccgcccactccgccgcgtgcccagcccgcgtcaccgccgtcctccccaggctccagcgcgccttgcggggccgcgcacgctagcggaaccgccgggaagagcgccgtgccgtcaatggcggaggcgcgcacgtctgcagggccgcgcacgtctgcagggccgcgcacgtctgcagggccgcgcacgtctgcagggccgcgcacgtctgcagggccgcgcacgtctgcagggccgcgcacgcactgacggctgaccgccatcttccctcccgaggcggcagttccaggtgcaagcgccgggtttgctgcccgctgggcgcccctgcagcggcccgagctgtggccggcgtggatgaggggcaggcgaggcagggccgcccctccagtattgccgcccctcccgccccagggcagggctgggagggtacagcccgggggcgggctcgggtcgcctcccggccgccgcgtcctcgctgccccgggccgggcgggcgggcgccgagagcctcccagcccgccccgtgccccgcccgcccggctgcttccgcggcggcgctgcccgcacatgggctaggctgccaggatgttcagcttcgaaggcgacttcaagacgcggcccaaggtgtcccttggcggcgcgagcaggaaggtgagggccgggctggcggggcgccctcggctcggggcctgcgcggccggggctcggggctgggactcggggctggactcggggctggactcggggccgagacttggggctggattcggggcctccctggcggggactcggggcttcctcgccggatctcggggccgctccggccgggactcggggttggactcggagccgagacttggggccaggactctggctggggcttaggactggactcggggcctccctggctggaactcgaggccgcgcccgtgggggccttgcctgtccactgcgcttcgggacccgggcgcgctggccgtggctcccttccatgcaggaggccggtgaaccctggcacgctttgtgccacccaaggtgaacttaccctttctgggtgtttcctttcagaaatgcgctttccatgctcgctcccgcatggcatcagggagtggctgcttttcgaatgccacctgaagggcgttttcggttgtagaaggtgaacggcacgcatttgctgatgtcgataatctctaaagtagaggcagaacgtctcatgaatagccacgtgtttgaatccaagacgagggcaattatttgccaccagcctcctggaaactgtggagagactccggacttacatctgttgtgatcgacattaagttgttcgcatggtaattgtttaggataagggtaggcaaaccatgacgcctctgttctagtctagaatttctagctgtctgtccctgaagacgggcatcagttggttcactggaaccgctaagtcgttgaacactgtgtggtcttgttcccgcccctcccttcccaccccttcccatcatttctgaaatgttctttaaaatgcttcacctagtttttcttgtctatcagtatattctgtatatcacaaccaccaggtaggcacataacgcagagtgggtgctggcaggccaaggaggaactgctgttattaagattgtgctgtggggctgtgtttggtggtttctgaggttagaagggaacctgggtaaagagttgggagagaagtgtgctgataatttttcagctttgaggttcgtgtgatggtgattgcttggaagtcacttgtgctccagaactaagtactgtgcagttaagggtggkcgtggtagcacttagggtcttccacgttaatgaaaatgttttatgagatcaaaggatttctacagttaggagagacttcagagaatctcagggccaaatcgccttgcttacaagttcggaaggtgagctgcagaacatttgaaggagtgcccattcacacagcaagctagtggcagaccatctgagactccatgccatttacacagcgccgcgcggcctctgttgcaggcaggaacaccccacgggccacggatgttggtcccttttcaccaaggagtgcatctctgctctgagggagtgagatttcttaactgttgatcagaatctcaagggaagatagcacgagctgtgtaaaagaatcacccctttaaaaacaaaactctttttattgaggtataacttaagatacagtcaggttcacaaacactaaagagatccttgtgcaagtgaaattgaggaggaagggcgagagggaagctgggtagggaaggaaaaggcgtctcagctggaggctagcgttaaccccatctcaccaggagcatgctacaattggccctaattgcggcagaggggttggtggctgcaggctgctgcccctccgggatgagggtgggagtgtggcactgctaaccctgagccgagggccattcttctgggagagagtggcagtaaagagcccttagtaggaactggcagcagctggggcatgggtgccctggcstggttaaggaatctgggtggggagccagctgtatgtacagcttgaaggatttttgcatatggacactctcctgtagatggaacaccactcacatcaaaggaagaccatccccagcattccagaggctcccctgcactctcacccattcattacagtcatatgtgacttaaagagggggacgctgtcactagtccagttggttgttgtgggaccgtcctagagtgcacttaacagaaacctatagccagtgttgcccactgcacacctagctgcttggtacagcccgttgcccctatgctacacacctggacagcgtgtttctgtgctgaatactgtaggcagctcttcatgcaatggtgagtgtctgtgcatccaaacgtagatacagtaaaaatacaaattataatcttatgggaccacggtgtayatgtggtctgttgtcgacagactgagaggtcattatgccatgtatgtctgtagccccacaaaggtgactgtccttctgacctccattactgtagatgagcgttacctgttgaacttcaggggcatggagccactcaccacttgtcstttgtgcccggctgctttggctyggcttctgtctgagaggtggactccatccgcctcggtgcacggcattgccctttgtgtgaacgcaccgtggctgattctgttttcttacagacctttgctgtgtgtgccttttggtgcacataatactcttgtgctgggtcctagatgatacgcatgttcagctgttgtgcacaccgctgccacagtttccccgtgtcgcacgcccacagcatctgaaggtatccaggtttccacatccttgccaacacttgatattgcaagtcctttaattttagtgaggatgtagtttctttgtggttttaattttgtttcctgacaactaattatgttgagcacctacatatgcttgttttcctgaattctctttgactgccgcataagtcccttcccttgttggaaaaatgaagttatagtgacccttttctcatgtcttaaattattatttgaaatcttccctttctggagcttagtggaaaatggagtggttaccacctttgaataagctttttcttttttcaaattaaatacttttagtatttattatttgtatagatctgtgtacgacaagtctgacttgaagaagttgataatcttgttgggcagataagacttaagcaattaaaaattaaataacaatagagtaattgctacattctaaatttcccttggtcctgattcagaaaaagtagaattgtttggagcttagtcctgaaggatgggtgtaattaggatgggtggaagacgagaaggcattccaggttcgtggagcggggtgtgtggagtacatgtagattggattacattgattcaaagtcactttggggagctaaacattgattacacatggacataaagatgggatgatagacaccagggactactagagggggaaagagagggacggggacaagggctgggaagctacctgttggtaactgtgctcactccccgggtratgggatcattcacaccccaaacctcsgcgtcctgcagtatattcttgtaacaaacgtgcataggtaccccctaactctaaaataaaagttgaattttttttttttttttgagatggagtttcgctcacgctggagygcagtgttgcccaggctggagtgcaatggtgcgatctcagctcaccacaaacctccacctcccgggttcaagcgattctcctgcctcagcttcccgggtagctgggattacaggcctgcaccaccacgtctggctaattttgtatttttagtagagatggggtttctccatgtcggtcgggcgggtctcgaactcccgacctcaggtgatccgcctgcctcagcctcccaaagtgctgggattacaggtatgagccactgcgctcagcctgaaatttttttttaagtcacactgatttctatctttaaatatttctgacatcgggatacacactgatagcatgatgcagtttaattgggggtatgtttttcttggtagtgtatagaagaatatcacggggtcatctgatttcaagtacagaaatggactaaaactagcttagtaggcaaaacaaaaagaaacaaaaacaagtttatgaaaggataggcgtgtctgacagaatagaaaggtcagaaacacccagatagcaggtatcaccaccacaggagttgcttgtctttctccaggagctgggtgcactcccttcttcctgtctccttcattcctggctctgcagactggctttctccatttctcacacatggtttcctagcttaagcgtcaagaaagtttgatcataattaccagttttcaggagaggaaagtctgattggcctgggtcatgtttccacctgataacctcagtctgaggagggcttggaggcttggttcagatggaacagtctaggtgcacctgagggctggggtagattcttcaagaagcggggagtggtcgttgactgaatgcctgagttcctgtgggacaggcacaggaaggagtctaggctagagatgcagatttgggggttatcaacagaatggtggcttcgaacacaggtccttaagaggacttggagtttgggacagggtgggactcgtgaggtactgcaacatttaatatgtgtgggagttggggatacttacaaaagagtcacacctcygggagtggaggagagtggtgtccagggagtgaatctcagggagggaggagtgacaggcaatgccaagtgctgcacagacacagtgagtccactgactgcggagctgggaagaattgggtgatttgagcatattctgtagggtagtcagagttggaagtcaagagcatagcacattggagagtgaatgggaagtcacaaacagggccgaacacaggccggatgctgtggcgcacgcctacaatctgccacaccgaagactgaggcgggaggatcgctggatcccgggagttcaaggctgcagtgagctgtgatcatgccatagcactccagcctaggcgacacagcatgaccccatctcttaaaaaataaggcaggggcaaggcaacagtgtagaccttttttgaaaagcaccggaagattggatgatagagggaaattcggtgtctcggaaatagttttgtctgttttgggagacgggggaaacttaagtttatagactgggaaggacgggggttaaaaatgtggggaagacaggagtggcataactttcagagtcttcgagaatacccgagaggggagaactgagtgggagcaggcaatgggaaatattttgagacttaaagaagctagggatgaatatggatatagaaaagtttgtagaccggaggaactgaaattttttaagtttttgtagatctgacaatagtgggagtagaattaagatcactttaatgtttgtccagtgctttttttaaaaaaaaatagactttattttttagagcagtttcaggtttacaatcaagcagagggtagggttcccatatgcctagtctccctcacctcacttttctctattactagcatctggcattaatgtggatcatcagttacaattgataaaccaatgtcgatgtgttattattaattgaagtccatagtgtacattcaggttcacactgtgtgttgtgcattgtgtaggttttgacgaatatatgatgacatgtatctacccttacagcgttatacagaagagtgtcattgccctagaaatcctcattgctggccaggtgtggtggctaatgcctgtaatcccagcactttaggaggccgaggtaggcagtcaggagtttgagaccagcctggccaacgtggtgaaaccccgtcactactaaaaatacaaaaaattagctgggcgtgggaggctgaggcaggagaattacttgagccctggaggtggaggttgcagtgagcctggattgtgccagcgcattccagcctgggtgacagagcatgactctgtctccaaaaaaaagaaaaaaggaggaggcccggcactttggaaggccaaggagggtgtatcacctggagtcagagttcgagaccagcctggtcaacatggtgatactctatctctactaaaaatacaaaarttagccaggcgtggtgacaggtgcctgtaattgcagctactcaggaggctgaggcaggagaattgcttgaacccgagaggcagagattgcagttagctgagatcacgccattgcactccagcctaggtgacgagagtgatactcttttaaaaaagaaaaaaggaagaaatcctcattgcatattcatccatccctcccatccctgtaacacctggcaaccactgatctttttactgtttctactctagccttttccagaatgtcatatagttggaatcatatactatgtaatcttttcagattggtttctttcacttagtactatgcatttaaggctcttttcatggcttgacagttcatttctttttactttattttttatcaattaataagctttttttttagagtggtttacggtttacagaataattgatgggaaactataatagagtcctcaaaacctcctctccgctgcacgctgtttcctttgttatttacatcttgtatctgtgtggtacatttgtgacattggagaactattgaattttaatgaagtccagctcaccagtgtttttttcatggatcttgcttctcgcgttgtgtctaaaaagtcattaccaaagccaaggtaacctagattttctcgtattttctagtagttttataattttgtattttacatttaggtctctgatccattttgagttaatttatgtgaaggatataaaatctgtgtctagatttttaatttttgaagtttttttgtttgtggatgtccagttagcaccatttctgaaaagacattccccaactccattgaatgcctgcctttgctcctttgtcaaagatcagttggctatatttttatggatctatttcttttttttttttgagacgaagtctcgctctgtctcccaggctggagtgcagtggcgcaatctcggctcactgcaacctctgtcaagcagttctccggcctcagcctaccgagtagctaggattacaggtgtgcaccaccacacctggctactctagtacagacgggggtttcaccatgttggtcaggctggtctcgaactcctgacctcgtgatctgcccgcctgggcgtcccaaagtgctgsgattacaggcatgagcccctgcgtccggcctttacgatctgtttctaagctctgttatggctttattctctcctccattgatctctctcccttttgtcaataccataccatcttgattactgtaacagatctgtagtaaactgtactacttagtatatatattaaactaaacttttttttaatttgagagggagcctcctgttgcccaggctggagtgcagtgttgtgacctcrgctcactgcaaactctgccttctgggttcaagtggttcttctgcctcagcatcctgagtagctgggtgggcatgtgccaccacacctggttaatttttgtatttttagtagaaactggatttcaccatgttggccaggctggtcttgaactcctgacctgaagtgatccgcctgcctcagcctcccaaagtgctggggttacgggagtgagacaccgcgcccaaccatagtaagcattgaagtctggtagtgtgagtccttcgacttccttcttctttagtattgtgttggctattgtggatcttttgcctctccataagagtcagtttgttgatattcacaaaaaaaacctgtggaattttgattgggattgtgctgaattggtagatcaagttgggaaaaactaaaatcttgacagtgttgagccttcctatccatgaatatggaatatctcttaatttgtttagttcttttatttctttcattggttatataattttccttatatataccttatacctattttgttagatttatacctaagcgtttatttttaaggggtgctaatgtgaatggtattgtgtttcagtttcaaattccagttcattgcttatttgtagagaagcaattgactttcatgtactaaccttatgtcctgaaatcttgctataatcacttcttagttccaggagtggttttttggttgatacttggaatttcctgcacagataatcatttcatttgcaaccaaagacagttttatttcttccttcctgatctgtatgccttttttttcttttttcttttctaagaccatcagaaagcaatgtgttttattgtcttactgcattaggtaggattatagttgaaaaggagtggtgagaacttgccttgttcttaatcttagtgggaaagctttgagtttctcatcatgaagtatgatgtttggtgggttttttggtagatattctttatcaaattggggaaattcccctctattcctagtttgcagaattttatcatgaatgaaggttgggttttgtcagatgctttttctgtatctgttaatgttatgtgattttccttctgcagcttgtggatatgatggatcacattaagtcattttagaatattgagcccgtcttgcgtatctggrataaatcccacttgactgtgatgcataattctttgtatacgatgttagattgagcttgttgatattttgttcaggatttttgcatctcttttgatgagggacatcaatttagggtgtttttgtgatgtctttgtctggtttggtattagggtgatactggccttatggaatgaggatactctagggcctaccaaaaccaattactatagtttttttgttttattttgtttttttgagacagagtctccctctgtcgcctaggctggagtgcctggagtacagtggtgcgatctcactgccacctccatctcccgaattcaagtgattctcctgtctcagcctcccaagtagctgggcttacaggcgcccaccaccaggcctggctaatttttttgtatttttagtagagatggggtttcgccatgttgtccatactggccttgaactcctggcctcaagtgatctgcccacctcagcttcccaatgtgctgggattacaggtgtgagccaccatgcttggcctcaattactctagttttaattcctcccctatgataggtctagactgttaagatggtaagaacttgattgcttagttttgtaaaactgccctctattatataattgaagggattacctagttttgtaaaactgccctctattatataattgaagggattacctagaatattttaacttaaaatgttttgtgctattttgttttaaaaagcagaggtgtaatggatgtgatagtataatgctccatatacattgtagtggaacataaaaactttttcttacagatctggcatcaaataaagtcaaaatattttctaagatcaaattagttcttttttttttttttttttcctttaagagacagggcctcactgtgtcgcccaggctggagtgcagtagctattcacaggcatgatcatagtgcacagcagcctcaaactcctgatctccagcgattctcctgcctcagcctcctgaggagctggaactccaggcttgccactacccaaccccagcctggctctgaaaatgttaattgactgtcaggactggtattatttagcaacactgcatttgttccttcgaatacagttatgctgtatcctttacatgtaggagcaaaagactgtagttccctgctatagataaggttaagaattctttttttgttttttgagatagagttttgctcttgtcgcccaggctggagtgcaatggctcaatctcggctcactgcaacctccgcctgccaggttcaagcaattctcctgcctctgcctccggagtagctgggattacaggtgcctgccaccacacccagctaatttttctatttttagtagagatgggtttcaccatcttggtcaggctggtctcgaattcctgacctcaggtgatccacccacctcagcctcccaaagtgctgggattacaggcgtgagccactatgcctggccaggaattcaaccgatttttaaaaatagaaaccaagcggaatggaaggagtgagacttgagactaattgtctcattgtctcattttctttggacattaaatctgggcctacagggaggtgagtaaagcaccatmcagtatttaaggaggcacttactctcaggttcatgcacaggcggaccctgcactggcacatccctgagagtgagtgcctccttaaatttgtgccttaagcatctggcttgcctcatgatatcccctacttggctttaaccacttgaatgtgtgctgattttcttgagttacagtgtgaattgccagctagggtccttaaaaggttgaaaaaatagatggtctcataagaccatagaatagcctcaaaagaagttcttgcaaaagctgtaaggarcttcactctgtgacttttctttaattcttctattatagaatgtaggcacctaggaatttggaagtggggcatcttattctttgactgtgacccctgttttttactgcctttaaagcagctgctttctgcatgtccttgttctcctgtctcaggcctccaaatgccgccctttaccatttgtcagcatgaaggagaagccatgctttccatagcccatcaccttcgatggtggtcaaattacaggctgtaatacctgctgttgctgagggcatacagacactgggcacaacctacctagggttggttataacagatttatcaagagtctaacaaggccaggcatggtggctcacacctgtaatcctagcacttttggaggtggaggctggcagatcacttgaggtcaggagttccagaccagcctggccaacgtggtgaaaccccatctctactaaaaatacaaaaaattagctgagtgtggtggcacccgcctgtaatcccagctacttgggaggcagaggcgggagaatcgcttgaacccaggaggcagaggttgcagtgagctgagatcataccactgtcctccagcctgggtgacagggcaagactctgtctcaaaaaaaaaaaagagtctaacaagatatgtcccctctaatccagcagaacaaatttctacatttagaaacgtaaaaatttattctagtgaactaatatgcataagagaagatgcatgggaaaggtgatttatggcattacttataatactgaaaaatactgaaacagcctacatgtctaaatacaggacatttgttaaataacygttaatataacaatgcagtgaaatactgtgcagccatttaaaatggtcatgatgcgtattaatgtctgtcattaatttattaacatacttgtatttatgaacatgatttattgttaatggaaataagtagattacaaaacaggattgcagtctgcatttaaattatgtttatctgaacagtaaagatagctagtttcccagtttcttaatttccattgaataaaagaaagatactagttgcttattgctgtgtaatagagcttaaagcaatacgtttttgttaccttggtcagttctgtggggcaggcatctggatctacttctgcgctggcctgttcacaagcctggaagttagtgctggccgttggcaggagagtcagttctcggccgcttgcggggcttcttagggataccgtgtcctcatggcagctggcctcccgctaagctgctgagcagacagagcagggaggaagggcaaagcctgtggtgactttggtcatggtgtatttgtccagcccactctcrgggtgaggggagtcgggctccaccccctaaagggcagcagtagcaaagcgtctgtggacataatcctgaagccaccgtagaagggagcttcaggtttagcttagtcgtaaacgctggcgctgcaaaacaaatacgctgtgttttctgcctcagcctattaggagttaaaaattgtggttttccttcttacctcttaycttctgtatcagtagttattggctacataaataacaacacagtgagttaaaaagcaagcattgtcaacatacattttggtgaatgtgagttcactcggagaagattgtatagctctttggaaatgtaacaaagaaattggcaaactaggagcagcttaaaaaacaagtaaatagagacctgacttaaaatgctatttttctagatgtgccctcctgatcatgtgctggcttttcttgtgaactgttaccttctcccgtatgctgcttggaaatgcttaggttcctgcattatcctgccggaaatactatctattaagccgtttaagtgtcttcctcaaaaaagcccagwagaaccataaggagtaattttttgtaacaatgcaaattcactgatttagatcatttagctttttaatccatttgcccttggagagaagagggggctatgcaattggaccaagrggagtcaatgattttgaagtcagtcagcccttggtttgtcaccatgacaaccgtggagcaggaggtagccacatcatgacagggaggagaggtgagtgaagtgagaagcaggggagcatcacagtaaagtggccgtcatctgagaactcttctgcacagcctcgtacccagaagtttgttccccttctgttctagtaccatgtgtgtatcctatttccagaaccccaagcaagcatcagtttttgtgtgctggactgggtaggattcttaggactatttacatattaacattactgtcaccagttagagggacagcatgggcaaagstgtccaaccatggagacgtggtgttcagctacaggttgtggccagaatgggggtgggcaaagggtgtagggaaagtggaagagaaggctgggaggaaggtagtcagggacagagctgggaggaaggtagtcagggagagagctgggggaaaggtaattagggacagagctggggagcattgtaggccacactaaggcatattcagggaggactggaaagccgctaaagagttttaagcacattaatgagacttaggttttagagatgcgtggggggcagtttgggtgtttgaatctagggaggcaaagcctgaagccagggaaatcaagggagaagcacccacacttgtgcctgaagagcaatgagggcctaaaacctgcagtgggcattttcttttaaggatgtttgtgtttctctccttgtttgtcacatgcagatccttgcgctcctcactatttgttctcctgcagggcacttttcgtttatgagctcattgatctcgacttctgatatgtgaggcagaggtgttagtgtcctgtggaggaagaaatcaaggcctggagtccaaataatttagcaaaacccccaacactgccctgtggtttgtttatccggatgctgtacggcctctccctcgtgtctgggcaggttgtcttgccggcacatcttgcttctgtctcctgctttacttgtgcattcctgtaactgcttgggaagttgaggaccacatcctgcaggcactgagaaggtggttccaacagtcctacatcttttggaactaatttttcttacagtgcagctttaacgttgtttaattttttgccaggtgtggtgatgcacgcctgtaatcctagcactttgggaggctgaggggggtggattgcctgaggtcaggagtttgagaccagcctagccaacatggcgaaaccctgtctctactaaaaatactgaaattagccaggcatggtggtgggcgcctgtaatctcagctacttgggaggctgaggccggagaatggcttgaaccccaggggagcagaggttgcagtgagcagagatcgcaccacttcacttcagcctggatgaaagagtgggactccctctcaaaaacaaaacaaaacaaaattgttcagttttgtacatattattttagagctgtgtgagcagacgctagattgttggcagttagtatggttcacatcacatcttgccactgtgaaacccctttactgcaaaagacgaaattttagaaagtgtaaccttgaaaaaaaaatagttaactctggaaccaactgtctgtgacttagctgttcatcttttctgggcttttctttgttgtattgcgtaatgggagagtcacaattctctttctaatttgtttttaacagagtccaggtctcacggcgttgcccaggctggtcttgaaccgagctcaattgatcctcccaccttggcttccccaggtaatcccaagtgttgggattacaggtgtgagccacacgcccagccagaaagtcataattcttgataaggataaaaccaaactagattatcacgaatcttccttgctctaagaatggttgcgtttctactctgcagtcagtggcctwtttaaaaagttaacttttcctcccggcactctgggaggctaaggcaggcagatgccttgagcccaggagttccagatcagcctgggcaacatggcgagatcccgtctatactaaaaatacaaaacaaacaaacaaacaaaaaaacgggcatggtggtatatgtacctgtggtttcagttactcgggaggctgaggtgggaggacggcttggtggggcgggggcgaggttgcagtgagtgagccaagaccgcgccactgcactccagcttgggtgacagagcgaggccctgtctggggggggaaaagttaactttttctgtttaaaaaaaatgataggccgggcacggtggctcacacctgtaatcccagcaccttggggaggccgaggtgggtggatcacgaggtcaggagttyagaccagtctggccaagatggtgaaatcccgtctctactaaaaatgcaaaaattagccaggtgtggtggcaggcggctgtaatcccagcwacttgggagactgaggcggagaattgcttgaacctgggaggtggaggttgcagtgagccaagatcacaccactgcactccagcctggtgacagttcgagattctgtctaaaaaaaaaagataaaaggtcagaccttctaaagagtatccatgaaatcatcttctcactgaatcccctaacttcccaccattattttctcagtatcctctcagaacaagtctaaacataaacatgtcctcccctctcattttcagttaaaatgagagatcatattgctttttcacctcaacaaaatrtcttagtgattccatatcggcatctttatatttgttatttttcatggtatataatactccatagcatagtttgatacttaatataaccactttcctatcaatggatacatataaattgtctttagagttttgctattaaaatagtgccttatttaccacacaattctgaggtaagaaaagaaagtctcttggcgtatattgtgatatttaaatgattgcgttttgcattggatacttcattttttctctagtcaagtgaagcagaaggagtggagaaggaacaaagaaatctataactggttgtagtcagactttatttttaaaaatgagctcttgtgattgtaaaataatatttataattggaaatgtaggctatactgaaatgtatttaataattacctattggaaccctacccatcccttagaaatgaaatgctgttaatgcatagtcagtttttttccccatctttgtgatgrtaaatggtcaaatattttcctagcattttaaaaactttcttttgaacttgcatcatcttgtgcattatgttttataaatatgatttttagtggctgatgatgatgcacctgtaagtatgttttgcatttgtgaaattggcggttctcatattttcatagagattcttatttcatgtaggtctgcaaaaaagaatcccaccccctccacacgcacacacacacattgtagcttatgcattactcacaaatgttaacttttaacattttcctttactcaaaggcaatgttctttgaagtgtataaaatggctagcattatgttagtgcctgagagccagaaaatactgaactgaaacagatgtgaagctgataattctgtgtaaatggagtaaattgttaatggaagataagccaaataggtgaaacaaaaacctcacagttttttggggttttttttaaatcaagatatttacaaacatgctaacaatcgttctgtaaatggttagcagttaatttgggcatgtggtcttttggaagttacttaaatttactttgacattcactctagttttttaacataaaaattttattctgagggtttaatgaaatctgatttaaactgtgtacgctttactatttcaaataaagaataaactttgttaccactaaatttatttagtgaagaaagcattttccccccatttgaaatcatcttggtaagacaaaacgaaaagaaaatcaccttggtaaatggcatttgtaagatttggtcatatttaatgttcagagaagataacgatagtacctaaagctccacaggcacccagagcagttggctgtgctcactgtggatttcacattgrtgggtagttacagcagggagcgtgcacgctgtcaggacgatggcctcggtcgtttcagagaccctttgggtgtttgatggaccttgtctgtaactgctactaggcatccytacgggttctacatctgcataatttgaaagataaggatgttttcaactatgagtacaataaattgaaaccaaaaacttgttaatcaataggaagttcagtcctttttcaaaatcaaactgctttctcctggtaccttayttgcccctttcctcccagccactcagtggtgaacttgttcctcattatattgagctgtttttagaacttgttctcatattgctttgttactactttgtttaaaagtgagaaaatattataagtacatgggtgatcattcagatgggaatgtaaacagtcaaataaaatactagagcctttcasctccactcctcacacccccagttcttttttttttttttttttttttttgagacagagtcctgctctgtcacctgggctggagtgcagtggcatgatctcggctcactgcagcctccacctcccaggttcaagtgattcttgtgcctcagcctttcaagtagctgggactacaggcgcacgtcaccacccccggctaatttttgtatttttcatagagacagggtttcactacgttggctgggctggtcttgaactcctaacctcaagtgatccactaccctggcctccaaaactgctagcgttacaggcatgagcaccgcatccggccccaattctttaatccttacattcacactctattttgggatttttacacatcctgtcagagctgttctctacatacataatcatataggtgtgtaaattcccttctttttaaaaaaaaaaaaaaaaacacaagctagagcatattaaacagattgctgtacttctcctgtcccccttaataatactctcggagacagttcctgatcagtagatagatctaccacattcctttaaagagctatatgatattccatgtagtgaatgccctataattttcagcagccaaaaaaataaagctgactccagtgagttattaatgtggtccttattatatgtgaagacagccttatttatagttaatgtcttcagttataagagtcttcatcattagactttttaaattacccttttaaaaactcatgtccggcccaggcggtaggaggaaaaaataaaggtgtaggcatgatcctaattcacaattatgaatatcagcatgtggctcacactagtaagtgtcagcttctgaaagtgaaatttcagcatactattaaaaataaacctgcaacaatgaattaaaaaattcaatatacagaaatccatgctagtgatgtggacggtaatagtccatgctgtgcatataatcctaagctgcagctactgaattcttaagcgagaaatttgactacattaagaattaaaactttgtacacataaaaatatcataaccaaggttaaagagtaacaaagggaatatttgtagcatcatgaaaatgattatttgtagaacaagatgaaaagataatcaaatgaaaaaattaaatgattcaaactgtggaaacataaaaagttagacgctgcactgtgcaggtgaagacaagggacagcagtcacttttcatacattgacatgatctccttggagggcaatttggaaatattcattaaaattcaaatgcacatagcctttgacctacaaagaaatttaacctgcagacattactgacacatttgcaaggatatccactgcagttttatttgaattagccaaaaactgaaaacaacctaaatgaccattaaaatataacatggtggctgggcgtggtagctcatgcctgtaattctagcactttgggaggccaaggtgggtggatcacctgaggtcaacagtttgagaccagcctggccaacgtggtgaaacctggtctctactttgaaaaacagcacaaaaattagccaggcatggtggtggaagcctgtaatcccagctacttggaggccgaggcaggagaattgcttgaacctgggaggcggaggttgcagtgagccaagatcgtgccactgcactccagcctgggcaacagatatatatagatatatatatatagagagagagagagagagagatacatataaacatggtgagacccaatctgtacactcttttttccttttttttttttttttttttttcctgtaaagggagccttgtttcatggcccaggctggtctcaaactcttggcttccagtgatctcctgcctcagcctcccaaagtgatggaattacaagtgtgagccactgtgcctggccctagagtcagctttaacttggaggctgcgaagaaaattcaaaggaaacacaaatataatgaagccttttgaaaaccagtttttcatggactggccgagagagggaacctattctattacatgccaaattccagtgtgaaaccatgcactcatactttattttgaaaccgtaagccatagcacccaaaacctgttaaacttttgggaacaaacaggttgaaagtagatgcacagagtggcaggaccggtgtagagaacactgcatctgtgcgttgtatttaatcacaaaggctasagctgctaattggccaagtgggaagctgctgccaaagctgtgattaaaagtgatgattagtcacaaagcaaataaaataatggacaagattcctttgtctaatgatttagctcattgtccatttttagatagggacaaatacattgagcagctgttattttcctggggaagacaaacttggttctgttcactagagactgatgagcccactgatactctgaactcagctaatcctttgctttgtcaggcatgagctgaatagacaagcccatggggacgttttttttctagctcgtcaattagaagaaatgctttaaaatctattgttgattttatgacaaatgacaacatagactccaagtgtgttgaatggtaaaagcagagatggtgtcttgggttaatatgagaatttggtccattgtgctccagcaccagaaactaccagaactaaagtctgctccctttttgtattgaaaacacagtcctactagtctcatgtatgcggggatattaagtccgttatcaatagagtgtgaaataatcactcctgtgaaaggcggagacttaattctctagccttgtgaagtcatgggcggtaactaccagcacccacttctccttcatcctgaaagcttgtaggtaggaaagtctctctctccttgactgttatctcaagaagagtgtcacatctttgtggagtcaaactttcaccatggcatacacaccatgattgtggaggaaagaattgtggaaaacttgaaaaaagtattttgaatatggcatttacaaagttaggagtatttgacacagcaggcatgtggggaaaaaaagaaaagattaaaaaaaaaaaacagaattaggattaaaggtctccatgaatgttttcctaaaccagttggtggcggtgaatggataaagacagtctccccctaccctgttttattaatatgtgartattaccaagtaaaaggacacattcaaaagatcagactgtggatggtttcttgaagcaaaagtttgttaaagcaaaatggcattttggttaggaattccttttcagaatccagttgtatcagagaacgtgattaaataccatttgcagctgggtgcgatggctcatgcctgtaataccagcactttgggaggctgagacgggtggatcacttgaggtcaggagtttgagaccagcctgaccaacatggtgaaaccttgtctctactaaaaatacagaaacagccgagcgtggtggcacatggtaatcccggcggcggaggttgcagtgagccaagatagccccactgcactccagcctgggccagagcgagactctgtctccaaaaaaataaataccatttgcttgcctgatctaattacagacatgtaaatcagaattctttggttaatatcaaaatttaaaaataaaactgtctaatagagcctaatcttcctcttaaactaagcagcgtagcgtctcgtattcttttgttgtgattataaacagtttcttttaccttgaggaatcaagtttcagataggactttttataaataaacttgttagatttttatgtaattccgtagttacttttttttttcttttttttttctgagatggagtctcgttctatcacccaggctggagtgcagtggcatgatttcggctcactgcaacttctgcctcccaggttcaagtgattctcctgcctcaggcctccaagtagctgagactacaggtgcgcgccaccacgcccagctgatttttgtatttttagtagagacggggttccaccatgtaggtcaggctggtctcgaactcctgacctcaggcgatctgccggccttggcctcccaaagtactgggattayaggtgtgagcccctgcagcagccactttcaaatttaactttaaaaatacagttttcattgtatttaatttggggggatgccttctgtttgtgaccagtgatgctgtttttctgtttagtgatgaaagatttccccttaagataaatatatttaggttaaaaagagtctttttggcaagactaacacaatagttgattgtatcatttgtatggtaccaagtagtagttcattatgccgttatgttttattactgagccagttgatgtcttagttggtgtctgcaaaatttctcccctttaaattttctgtctttcccttgttaattgatctatatcttgagagatactttgagactaggcaaatcctgtttctcctcaaacttttgcccactaattttagcatacattagtagatcttgtctgcagtgtttttctgttttctgcttttctctttccttctacatttttaaactggattctgtgaggaaaagagttttcttttccttgtttattgatttggttatttatgtaagtattgagtccatgatgcgtgtttgtgcgtataatcctatggattaaaatctaatgctatccttatttcgtaaccttactgtaatcatgagagtattggaaaaacccaaattgagggacagcatccaggacatgaaagatgaagataagaactctataagattggaggaagattaagaagaaatagtacctaaatataatgtggggtcctggataggattctagaacagataaacagcatcagtgggaaaattggtggatttctaattaagtttgtagattagttaatgttattgtatcagtgttaatttcctgtggataattgtatctgcttaatgtagaagtgagtaagacatatgggataagggaaattgtaccatttttgtagcttttctttgtctaaaattagtttctaaaagtttaaaaaattaaagaatattaagtaaacaatcatgaatcattttaattaagtttaaaacaatattttttctgctgttggacatgtgatgaaggttttttatgtgaaattttctttgatagaaagtatctggaggattaatttctttgattttactttttttttttttttgagacagggtctcgctttgtgactccagcaagagtgcagtggcacaatctcggctcactgcagcctcagcctccccagttcaagtgatctttctgcctcaacccccaagtagctgggactgcaggcatgcaccaccatgccttgctaatttgttttgtattttttgtggagatagggtttcaccatgtagcccaggctggtctcatactcctgagctcaagtgatctgccctccatggccttccaaagtgctcggattatagccatgagccattgcgccaagtctggctttacattttggcaattagaaacttgattctaggccaagcatggtgtctcatgtctgtaatcccagcagttcgggaggccaaggcgggcagatcacttgaggccaggagttcgagaccagcctggccaatgtggcgaaaacccgtctctactaaaaatacaagttagccaggtgtgatggtatgcacccgtagtcccagttactcggtaggctgtggcacgagaattgcttgaaaccgggaggcagaggttgcagtgagccaagatcgccactacactccagccctgggtgacagagcacgactctgtctcaatttagaaaaaaaggatagaaactttgattctgaatattgttagttcatgtatcagtgtataattttaagttggcttaactactctctgacactgttctgataaagtatatctcttaagatatttaatttttttttcttttttgagacggagtcttgctgtgttgcccaggctggagtgcagtggcgtgatcttggctctctgcaagctccactgcctgggttcaagcgattcttctccctcagcctctcgagtagctgggactactggtatgtgccaccatgcccggctaatttttgtatttttagtagagacggggtttcactgtgttggccaggctggtctcgaactcctgacctcatgatctgcccgcctcggcctcccaaagtgctgggattacaggcgtgagccaccgtgcccagcctaaatttatttttttgtaatgattcatatatagtgtctccaatcttgaactttttttttttttttgagacaggatcttgctttgtcactcaggctggagagtggtagctcaatcctggctcactgcagccttgacctcctgggcctaagtgatcctcccacctcagccccctgagtagctgggactacgggcacatactgctgcacccaactatttttaaaaagtttttgtagaggcagggtctcaaactcctgtgctcaagtgattctcctgccttggcttcccaaagtgcagggattacaggcatgagccaccttgcccagcctggacctttaattttattttggatgaaatttacaaaaataaaatgtccatacactaaagactggaacagtctttgggggagaagagggttctgtttaagtatttttcatttatttgaagttttccttttattctttcacttccttctacaaaccaagtcattttgttcaaaacttagttttatttatgaaaaaaaattttcatcaaagaaattgatttcttcattgaaatttttattgagataattgtagattcatatgcagctgttagaaatgatacccagagatggccgggcgcggtggttcacgcctgtaatcccagcactttgggaggccgaggcgggtggatcaggaggtcaggagatcgagaccatcctggctaacacagtgaaaccccgtctctactaaaaaaatacaaaaaattagccgggcgtggtggcgggcgcctgtagtcccagctacttgggaggctgaggcaggagaatggcgtgaacccgggaggcggagcttgcagtgagccgagatcacaccactgcactccagcctgggcgacagagagagagactccatctcaaaaaaaaaaaaaaaaaggaaagaaatgatacccagagacccctgtccacatcacccagtttcctctggggtaatattttacaaagctagtaagatgtcacagctagaactctgacattggtacggagcaccagtcttactcaacatttccccagttttacctgtactcatttgtatatgtgaagaaatcagattttatgcttaaaaaactactgaagtactaacttgtattatatctagtgacctctgggaaaccatttaacttcttgtgcctcagattctctcatctgattaagtcaagacagcttgtttggatgatctttaggatctttttttgggtgaaaacattctgtaatttttgtrtgggagttttaaaattgaaattataaccttacctccttttttctctgtttgggtgtaggaggaaaaggcttctcttttacatcgtactcaggaagaaagaagaaagagagaggtaaaaacagttttgtaatactctgtagataagcattttttctacagcatttaaacatgccttggttttactgtatatatgtatgtgtgtatgtattttttatatatgacagaatgtgtgtgtatgtgtgtttagctttagaaacatttattctggagccggtgtagaaagagatggactaaaagggcagtttccagactggagaaggaacatgggcttttggttgacttacataatgatatggtttccagaagatctagaaagccgtattataaatataatgttcatatttctttttcttctcttttttttaagatactgagtcttgctctgtgacccaggctggagtgcagtggcaagatcatagctcactgtagccttgacctcctgggctcggtgatcttcctgctctagcctcctgtagctgggactacaggtgcatgccaccatgcccagctaatttttaagatttttacatagatagggtcttgctttgctgccgaggctgatttcaaactatggcctcatgcaatcgcctccctcattttcccaaagtgttgggattacaggcgtgaactgcctcgtctggctgatgatgttgatgtttcatgaagcataaggagaaagctcactgttaagacatgtgtcttaactgtttgtgaagaaggtaaaagaaagacactaatgacatttttattgtttatcctacgttatatcttgtgatagtttctttaaatagctttattttgttgattaatcagcaattgtactatcttatgacctgcttttttaggtagagttttttgttttgttattttaacaattcatttaggcccctgacaaatatttattgagaacttactatgtatgtactaggtattgctctgcttgctgggtatacagatagtgaataagacagacaaggttcctgccgtgaaccaggatgctgaggtggtgacaaaacctgtgagggccacagagtaatgtgattacagctggaagggcctatattagagatggtgtttaggggaagggctctctgaggtggttacagtgaaaagagtttaggcaggattttccaaccttggtgctgacatttttgaacagataattctttgttggggggaactgctctgtacattggaggatgtttagcaacacccatggcctctacccactaaatgccagtagcactccgttacctcagttgtgacaaccaaaaatgtcaccagaaactaccaaatgtcccagggagggcactgctcaaccaagaaagatatttgttggttggtgtttttaatcttgttttatggaaaattctcggccattatctcttccattagtgcttttgcttcattcttctcctcctctcctacttggacgcaaactgtaaatgtttttgacctttgcgtcgtttcccatatttccctcatgtgcttttctctgtgtttatccttttgaatatctctgcttcagtttggatattttcacctgacctaatttctgatttacagctgatctctttagcattgactttttttttttttttttgaggtggagtctcactttgtcaaccgggctggactgcagtggcacgatctcagctcactgcaacctccgccttccaggttcaagcgattctcctgcctcagcctcccgagtagctgggactacaggtgcacgccaccgcacccagctaattttttgtatttttagtagagatggggttttgccatgttgggcaggctagtcttgaactcctaacctcaagtgatctgcctgtctcagcttcccaaagtgctgggattacaggcgtgagccaccctgctgcctaattgttaaatacatccattgacttcgtaatttcagtttttgttatttcagttctagaattttctttcattcttttatatagtctttagttctcttttaatttcttgaacataattatagattttttaagacaatgtttaaactccagtaattggatcttccgtggggtttgtttctattgtttgtcttcttgatttttaatctgatggggtttcctttataggtgactagctgcttttcttttgatgcttttagaattcagtctttatctttgactttagatagtctgattatttgcttggagatcgttgagtctgctgtatgtaggtgtctaaatctcttgtgagacaggaagttttcatctattatttcattaaataggtttcctaatcctttctttgactctttgaccttggtgttaccaatactttgaatattttattgctttatgttatcccaaatgtcatgaatgctttgctcattcttttttctgtatttttgtctggctggattatttcaaaagacctgtcttcaagttctgagatgctttcttttgcctgattagtctgtcttgaagctttcaaatgtattttgtatttctttaaatgaattcttcacttccagaatttctagttgattctttttaaaaatacttactctttggtaagttgctcacttatatcctgaattatttttctgacttctttgtatttttcagaattcccttgtatctcactgagctttaaaatcaatattttgagggctgggcgcgatggctcacgcctgtattctcagcactttgggaggccgaggcaggccgatcacctgaggttgggagttcgagaccagcctgaccaacatgaagaaaccccatctctactaaaaatacaaaattacccaggcatgctggcgcatgcctgtaatcccagctcctcgggagcctgaggcaggagaattgcttgaactcgggaggcggaggttgtggtgagctgagatcacgctgttgcactccagcctggagtgaaactccgtctcaaaaaaaaaaaaaaaaatcaatattttgaattatttgagattttcaaaatttctatttgattaaaatctattgttggagaattattgtattcctttggagatgtcgtatttccttgttttttcatgtttccagcatccttacattgccatgtgcatctggtgaaagttgctttttcctgttggtggtggtggtggtggtggtggtggtggttgtttttgagacaaagtcttgctctgtcacccaggctggagtgcagtgacatgatctcagctcactgcaacctccacctcctggcttcaagtgattctcctgcctcagcctcccaagtagctgggattacaggcgtgcaccaccatgcccagctaattttttgtatttttagtagagatggagtttcaccatgttggccaggctggtctgggactcctgacctcaagtgatctgcccacctcagcctcccacagtgctgggtttacaggcatgagccaccatgcccgacctcacaggatttttttataaccatttcaagcccaggaactacatctacatgacctgatggtgttcttgaatcccacagtgtgtgtgttagtctcagctttgtagatggcattcatagaagacatgaaacaaggtagtatggtgagatggagtacaggctttattatcatacctgagtttgaattctgctttacatctttgggtgttgcttaatttttatagcagtctcagtttctgcatctttaaactggaagtgatgctcacctgtaagatgactgtgcatttgtatataaaatgcctctctctctctcttttctttttttttttgagacggagtctcactctgtcacccaggctggaatgcagtggcgcgatctcggctcactgcaagctccacctcccgggttcacgccattctcctgcctctgcctcctggtagctgggactataggcacccgccaccatgcccggctaattttttgtatttttagaagaggtgaggtttcaccattttaaccaggatggtctcgatctcctgaccttgtgatcctcctgcctcggcctcccaaagtgctgggattacaggcatgagccaccatgcctggcctaaagtgcctctcatagggctggcacatagtagtaggctgtccaacagcagtagcactggtcataacaatgatgaagaacgcatatttttgccaggtcgctgaacattttaaagatactctcaagtcaatgaaaattggaattttctcttgaaacaagaaagtgacctttaaaatagatgctggtgttgtctgcttgtattcctttaatatttaaaactttaaaaagtcctgctagccgggcacggtggctcatgcctgtaatctcagcattttgggaggccagggctggaggatcatgaggtcaggagatcgagaccatcctggctaacatggtgaaaccccgtctctactaaatatacaaaaaattagccaggtgtggtggcgggtacctgtagtcccagctactcgggaggctgaggcaggagaatggtgtgaacccaggaggcggagcttgcagtgagctgagatcaagtgggcgacagagcaagactctgtctcaaaaaaaaaaaaaaaaggtcctactatgctggtgagattgtaaaatggtattgccattttggaaaacagtgtggcaattcctcaatgataactctacttctaggtttatgctcaagagaaatgaaaacctgtatccacaacaaaacttatatatgaatgttcatagcagccttaattcataatagaccaaagtgggagcagcccagatgtccatcagtagatgaatggaggaattcaacgtggtccatccatacaatggaacattactcttacttagccttaaaaaggaatgaagttctcacatatgctgtaacataggtggatcttgaaaacatcatgctaagtgaagaaaaccagacacagcatattgtatgattccattatatgaagtgtccagaataagcacatccataagatagaagtagatgagtgattgccaggggcaagagaagggacggcaggaaacggggggtgactgcgaatggagacggggcttctggttgtggtgatgaaggtattctaagatcagtggtgatggttgcatagctcttaatatattaaatgcatatttagtgggtgttaccttttaaagaatgaattttatggtatgtgaattacatagctgttagtgtttttaaagtctttactagcaaaatgtcattttcactggattctgaccaattgctmcctcactcctccttttattgtttaggaagaaaggcgaaggttgaaaaatgcaataattatccagtcatttattcgaggctatagagacagaaaacagcaagtaagtttgttttaaaatgaggagattagtagggcatgggagagcttattttaaatatggtatctttgtacaccttgttaattgaagtcaatgctgacagtagtattcttcccaataaataattttatttgttctaattattgkgaagatttatagataggtgagtttttaggtaatttttaaataataaaatacaaacatgggcctcaccacagttgaaaatcaaaatagaaggaagtcatgagagatcctttttttttttttttaaattgagactgagtctcactctgttgcccaggccakagtgcagtggcatgatctcggctcactgcaacctctacctcctgggttcaagcaattctactgcctcagcctcccgagtagctgggattacaggcatgtgccaccacgtgcagctgatttttgtattgttagtagagtcggtgttttgccacgttgaccaggctggtctggaactcatgacctcaaatgattcgcctgccttggcctcccaaagtgctgggattacaagcataagccactgcgcctggcctgtttttgttttgttttttgttttttgagagagtcttgctctgtcacacaggctggagtgcagttgcacgatcttggctcactgcaagctctgcccccaggttcaagctattctcctgccccagcctcctgagtagctgggactacaggtgcataccaccacagctggctaaatgtttttgtatttttagtagagatggcgtttcaccatgttgcccaggctgatctcgaactcccgacctcaggtgatccacccacctcggcctctcaaagtgctgggattacaggtgtgagccatcgtgccctgcctagcttttgtatttttagtagagatggggtttcgccatgttgggcaggctggtcttgaactcctgacctcaggtgatccacctgccttggccccctgaagtgctgggattaaaggcatgagccaccatgcctggtttttttttttttttttctttttaaccattttttttctacaattcaactgtgagcaaggaccrataatggtgttttcgttgtcaatttccaccattcctgtaaacacagcaacgtatatttacatcataagaattgtgtgtccaaatactatatttatgggtcattttgttttgtttttcttccagtattccatccaaagaagtgcatttgatcgctgtgctaccttgtcacagtccgggggcgcttttcccattgctaatggccccaaccttacccttttggtaaggcagcttctgtttttttacaaacaaaatgaagactcaaaacgtttggtgagtgttaactacrttttcacttgtcctcgtttacacgtgttctgcttttttgtttaaagtggaaatggcttctcatcagaaagttaaacagctctccactgcatccaggctttgcaaacttctcagctagctgtgagaggttacctatgtggtgatgtgttttacctcttaaaatttgatacacataaaaatgtgtatccaaaaataggctttttcgtattttttgcagtggaaaaccttaagcatttaaaaagcagaatattttgcccacctatcatgtaccctgacacagccttagcagttgccagcacgcctaggtcagtgggacgtgcaccctgaataccacatcatgattacttgcaaactctaaaatacarggtctcagtgtttacattttattattattatattagagatggggtcttactcagttgtcttgaattcccaggcttaagcagtcctcccacctcagcctcccaggtagctgggactacaggtgtgtgtacaccttgttaatgttaaggctaatttttttttttgtagagatgaggtcttgctatgttgcccaggctggtcgtgaactyctagcctcaagtgatttttccctccctggcctctcaaagtgctggaattataggcgtgagccactgtacatgatttagggtctctttttgtggggagggcactgagggagtagagccttgctcttgtcacctaggctggagtgcagtggtgcattcttggctcactgcaaccttcccctcccgggctcaagcaatcggtggtgtctcagccacctaagtagctggaattacaggcgtgttaccaacatgcctggctaatttttgtatttttagtagagacagggtttcaccatgttggccaggctagcctccaactcctggcctcaagtgatcctcccacctcatcctcccaaagtggtagaattataagcataagccaccatgcccagccttagggtctcatgtttttaaaaaaaatcccaaatgtaatcgtagttctctaaaattttgtaggctgttgatcttatcagtgctgaggaacagtgtgtattaatggtggaaaatacaaccagatgcatagaagaataatttttttaaaaaatggaatttgttactgtccattttctcaaggaatattaagagatttgtatataattgttgggttatatacatttttaaatattttatatatatatatatatatatatatattttttttttttttttttttttttttttttttttttttgagacagagtcttgctctgtcacccaggctggaatgcagtggcatcatctcggctcactgtaacctccgcctcacgggttcaagcgattctcctgcctcagcatcccaagtagctgggattacagacgtgtaccaccacgcccagctaatttttgtatttttagtggagatgggatgtcgccatgttgggcaggctggtctcgaactcctggcctcaggtgatccacctgcctcggccacccatagtgctgggattacaggcatgagcactgcacctggcctaggttaaatatgctatttatcttttttttttttcctttttgagacggagtcttgctcactctgtcgcccaggctggagtgtagtggtgcgatctcagctcaccgcaacctcgcctcctgggttcaagcgattctcctacctgagcgccctgagtaactggggttacaagcttatgccaccacccctagcttaaatttttttgtatttttagtagagtcaggtttcaccatgttggccaggctggtctgtactcctgacatcaagtgatccacttgctttgacatcccaaagtgctgggattacagacatgaaccaccacacccagccaggttaaatatataatttatttttggaaatttttgtttatctgtgttaaaaatttcaaattgcatgaaaggggagtatacagtgaaaaataagtcttcctcgctacaaaccatccctactagaatgatcctacttgaattaattacagcggacaaaggaatacatgattattcctctagtgtttggctttaaaacccagcattgcctccrgagttgagctaaggtggaacatggtgaagactttctgtaaaccgagaacgtgcagagaargaactgagagccagtctagagaggcagtgaaagccgttgaatctacccattctggacttcagttaagtgcaggctctttccaggcttgctttctgaagttgttgaaaaaaagaatcagaatagtacaacggcagataatcgggcttgctttctggaacaggatgtcctggcctcacatactctaatcttgtagattgcaagatcaccaaggagcacagacaggcaggtgctgtgagatgtcgattggtgtctctccagagcacctaytgcctttgagtgaggtcctcaatcttagtcatcagtcacgacatggtgtagctacacagtcttgcttcagaagccatctgtgaaaagcttggaggtaaatgaacatatttgactttcggcctcgagcaaatatcaagcaaattgctcatgtgcagattctgaaacctgaaatagaattaaatgtcataagaccagtccaggaaaaggataaaagaaaagtgggctggacacagtggctcaggcctgtaataccaacactttgtggggctgaggtgggaggatcccttcaggccaggagtttgagaccagcctggccaaaataccagaccccacctgtaaaacaaagcaaaaaataaattagctggctgcggtagcttgctgctgtagtccagctacttaggaggctgaggcaggaggatcgtttgagcccaggtattcaaggctgcagtgagctatgatcctgcgactgcactccagcctgggcggttgaatgttgattcagttctcaagcatrgatgcgatagcaataaattaatcttaacgtaggggaaaatgtctcctgccccagtcttcacattgtttgccttctactctaggagtaagcataatgccacttttgatgggttttcaaagttattctatgcaaaaatcaacatatatggctatttcttcctcacctcctttttaaaaaatttttcttacgactttaagtcaaatatggtactaagattatattttatgtatagtttaattctggaattaattgcctcactttttagttgcttaattttctttgaatcttttgataaagtcttcttccaacagtcctattatataatgtatagttattttacatcttatttgttaactgataatagaaattttaggacgaactacatgtcagatggtgaagggagtattcataccttattcattcctgagaaaatgtgggcaaggtggctccaaacacctcaagagaaagcctgtgtgtaggcaaattaactaatattcggagtagttcagaattatttcatcccagtttaagacatgcgctaatttattatgcagagtgcttttgtgttggtaatttcattgtttaataacgttttatggcaaagaaatgttaatgtcgaagaaactacttaaaaatataggcaaagacaaggctatgtggcgtatttatgactrgctacacttaagaggctatctttgccgagggtggtggctcacgtgtataatcccagcgctttgggaggctgaggttggtggatcactcgaggccaggagttcgagaccagcctggccaacatggcaaaccccgcccctactaaaaatataaaaattagctgggcgtggtggcgggcacccgtaatccgagctacttgggaggctaaggcatgagacttatgcctaatatatgagaaataccgtatttctcatatatttttattacagatttctgatatttgcaagtgaactatttttgtttcagattgacatgagctttaagtgtactttgttttagttactaatttagtaatttaatactgatgtgttattttaagattgaaaatgcaaatacttttgtttttttggagacagggtctctctctctctcgcccaggcagtgcagtggcttgatgttggctcactgcaacctccacccacaccccgcaagttcaagtgatcctcccatctcagcctctcgaatagctgggactaccgatgtgtgccaccacgctcggctaatttttgtatttttttgtagagacagggtttcaccatgttggccaggctggtcttgaactggacctcaggtgatctgcctgcctcagcctcccaaagttacagacgtgaaccactgtgcctggctggaaaatgcacatacctctaaataaaaccgacttagaatatttacttcttaaccatcttttgattaggtttgattaaatgtgcattgccactaaaggaaatttggggtattatgtaaattagcaaactattaaattttcattgagagttgtatattttatgttttgctgtttcagatatggctgtatcagaacttaattaaacacagctctctgtttgtcaagcagttggatggatctgagagacttacatgcttatttcagataaaaagattgatgagcctctgttgcaggtaaaattctattgtaagtcagtaacgtatataatgtattgatcaccttgtctaggggaacaccttttgacttttattttcagagacagtggcttttccatactttttttttttttttttttttgaggtcatggacttctgtatatattacaatttttactgtaggtgattcaggccggcatgaggtataaatgaagacacatattcagtatctttcagatgactttttctttcacggatgcctttgaattatcttgtgaatgatggccatcctggttactggagaatggaaggccagccaaaagaggactcctgatgtgtgagaatgattccattccataggggtctccaccaaaatgcagtttgaaagccccatctttagaatacacctttcatcaggctttttattatttatgtaggaacgcagcataagccactgccgtgactttcttgcattcagtgtccgaaagaacacgtgtaagtgatgtgagttacattacctgaatataacacctttaccagcttttaataaattgcttatatctcaactgtagtaaaattttcaaatgatcctgagccttccatataatttcasttaattttctggacactgtctgtaatatttgtttaggattactgtcagaactagtctttattaactgatttttccaaaatacttagctggaccaaaggtaggaataaagaacctattagaagagagaaccaagaggatcctagatgccagtaattcatattttttctaacttatttctttaataaacttttagtttgaaaaacacattgtatacattctttttgtgaagcaggagtttgcaaactttttatgtaaatggcgagatagcaaatattttaggrtttgtggtccacatatggtctctattatgtatttttcttgccttttgcttacaactctttaaaaataaaggaatcatgcttcactcaacagccgtacaaaaaacagccctagggctggtttggcctgtgggttgtagtttgcaaaacacctttaacgtaacttttgaatgtatttgtataagcaaataattttgatacatgatatatgtaaatataattattcttttcccaacttttatttttaaaaatttctaataccagaaacacctgaagcccaggagttcgaggctgcagtgagctgtgattgtgctactgaactccagtttgggcagcagagcaagaccatgtttctttttttattatttatttatttttatttttgagataagagtcttgctctgtcacccaggctggaatgcagtggcgtgatctcggctcactgcaaccactgcctcctgggttcaagcagttctcctgcttcagcctctcaagtagctgggaccacaggcacgtgccaccacgcccagctaatttttgtatttttagtagagatggggttttgccatgttggccaggctggtctcaaactcctgacctcaggtcatccgcctgccttggcctcccaaagtgctgggattacaggcgtgagccaccgtgcccagccaaacccatgtttctttaacaacaagaaaacactcctcctcatctttcctctttaatctcagtaaggtctcatgtattttttaaaatacagtgtgtgacagatgacttttaatggtstgcttataggtagagagcaccctgtaagcagcccgtttttcttggcttggcctcatttgtattttgagagatctttgttttctgtgaggtcacaaagccttaagtgctctctctgccccaggcctggggctgttttctctaaggagcactgattctttttgatgagaaatggaattttaacaaaatgtaaatgttagaaattgtacttcaagtgtatgttagtaagtcgacagtcttatctgccacgtgccagaacattgaatttttctttttctgtaaatgtggccttccagaaccacctgcagctccttttatgactaatcacatacatattttttaatgccgttgaacatttctgaagtcatggaatcactgggtcacatagtagttatatatttcactttagaagaaactaccaaacttaggacagcagcataggagaggcgcagttcctccatatcctgaacccttggtattgacatttgtcaaaacccagccattctgatgggtgtgtagctgtattttattgtgattggaatttgtatttcctggattactaatgatgacgggtgtttctcaggagcatactggtcactcagrtggctctttttcaagagtctgttcaaatcttttacttcattttttaaggtgggttgtctcttgacaatayggatatccttttcccgtccaaggctgtcccgataaacctggagctacatcctatgttgtctctcacacgaggcaccgttccagcacttctctctgttgcattatcaggtttacctctcacatgggattatcagcacacatgctgctgacttttccaggttgacaagaggctctcccaccgcccgccgctgccctttgcgtcccagcggcttgttatgtgtagccccrctcctcctgcactcgtacacccctcgagagacaccagtgtggtgctgaggggaaagttgtgaaaagggcaaagacaaaacaaggtctggctgggtgtcctgcccagcctgcccgctgggtcctcaccccctgtctctcctgggctttgcggctgttgagacagaaggcagcctgcagtaagcggataagccgtgtagacacaccccacccagaaccctgcacgttattcccctcctggcagggcagaaggcttttgtcacatagagaagttagtttcagtgmggcattgaaacagcctcctgggtccctcattaaaggtgatgtgtggtcagatggattctgtttttttttttttttaagaaaaaggaaaaacagctgtaaaataccttgtgaaagcaacaggagaaatctaaaaataagttcggtgttagacaaagtttttgatagaaaaaaggattggggtggggggaaagagggaggagtggactagagacagccaagaagaaactttcgggagtggcagatgtgctctgtgtcttgattggtgcggcctgcccgactgcttgtgctrccctctctaaacggatagttaacctgcagttcttctcatagtaagaagggaagcctcagtcaaaatgagagttgacttaggaccagaaatatatcattgttctatttgggggatattgcaggcgtggaaagtctcaaaagcatctttaaggagatgagatgcactgttaaagagattcgtatctgagtttaattaaatgcagcttcttggtacaattcatggattataatacttcttacagtgttttrtaatctttaatttttcgtgttcatttctccactgtccatttttcttgtctgtgaacttagtgccagcataccgtttggcacataacgagaattcttttaaaaactgtctgaatgactgaatgttagttggatgatttccctgtctatctgtaagatgtccctattttcagagataatcttgtactggaatagtttcttaaccattgtcactgagagtaacttggggaaactggtgacattttgccatcctgtaagtgtgtgaatacttttttcatttttacaggttgctgcaaaactgtaatgatgacagtttgaatgttgcacttccaatgagaatgcttgaagtattttcgtctgagaatacttacttgcctgttttacaagatgctagctatgtggtgtcagtgattgaacaaattttgcactacatgattcacaatggtaagtagtaggcaggatcagaactgtggctcagcatccygatggggagtgagcagaggccagcctgctgctgtgagcctgtgccctcagtctcaatgtcagagcggtactggtgtcccagacgccttgtgctccatccacaggtgcccaccagagtcccagattccaaaatctgtccttggctccacccactctgaaaattcagaaacatgctactctctttgcctttttcttttgcttggaagtgaaccaaaattgacatatgctttcatcagttgtcccgtcatccaagattggtgtctgcagtgcagctgccggtccttcacctgaccaggaagggctcttaccacctcctggtcattctgagtgaatgggaaaggtaatgccaccaatgtatgagttgaacatcactccaagagccttatgaaaaagtaaattttgttaaatgatttttcttccaagagtgaggtcctttcacattagttcagtagaagagaataggatatttagtttgaattttctaactcagtgctaaagttttaatacattgataatgctcctaaaatgactgcatcgtagaagctatactgaactgcatctgaaacccttgaggacacattagtgacactttctggagaaaaaggatgaaataaacatgatttttaaaaattttatgaagtgagcagtataaatcctaacacaaaagaacctttggtctcgacatcctcataggtagaaacccaagcacttcaggacwcctgggctcgagaagtatttgtcagcattaaaaatgtgcgtgagactagttgtgaagggaggtctggagagccgtggctgcagacagaattataagcagctgtgctttccttcacctgaagtcatagtctgggttacatctaacggacttgaagtctggaccacttggtcctcttggtcctctgtcaaaactacagaaattaaacgcatactcatttcagccttgctgcttgrcgtgttactattttttagactccttagtttgttgaaaacttagggaaacagtattccgagttaattaaaagtaaactgaaagttgtggaatttgatctttttaaaaactaataattaaaagtggttcattgtgttagttgacatatatactgttttaagactaagcgtttgagaatttgtatttgttttctaaaattgtaaggaagatatttaagaaatatgcattatttgaaatgtgtcccaatatacgaaatgcttaaaaatcttacacagaaactgccgcttctagcatcttctgtggtacagcagttgtttactttctaacagtcgataaaattttagccttttaaattayagtattaccattatttgtattgttattgcacattctgtgccatgaagctttttaacatttgcaacagaacctttgtcatgttgtcagtctattcagtaagtacattgttagttatgttagtcacttttttaaaaaagtctctgtgtattttttaaaattcttgatgtatttttatctttttagtttcatagcaaaagagctttcaagctttcatatgagtttcactagttatcagtatacactaggttagacttggggtagttacaaagtaggtctaatgataaagtactgagtatgcattgtttggtgatcttcactcaaatacgaagctgtgtaggactgtttcaaaaactagcccatgcagatggattgtttttaatgtgctaccawatacgcttgtatatgatgagatactcaaaaattgcacctgaaccttcttattctataaaaatggagtaaatgattctgaaagaatatatgatttggatcattcttgatacccagagttatgttcactgcctcccacccagagttcctatcagaagcgtaggctggatattttaagaggttctgaaagttgtttcagtttacgtataagctgcctttaaacagttaacttcttcagttcccagattgtggtctccaaatacatcatctcctctaaaaggagcttaagagtttctggagaaaaggctgattgtagggcgggatgcaggactgccagtgaccctggggctcaggagcctcctaaagcccaccccggggccccaggtggagcagcatgaggtcaggactacagtggaatgaaacctaccaatatgttcaactctatgaattcaacacggtgtttaaaaaatgcacaaatcagagacaaattataagatcacaatatgtggtccttattgagctccttcctgatgcaagcaaactagttaaatagaatttctaacatgagacagttggagacttgaatactgactagatatttgtgatgttaaggaactactcttcatttattttagctgtgataatgtttttaaaaatagtctcttaatgatacactaaaataattatatcttagacttccttccaaatgagtggtatacaggtgaaatgagattggctgtagttgacagttgttggtacatgaggtttgtataccgttcggctgcctatatatttgtttagttttccttgctagcatgttaaagaactaacttaagtttggacctgtagagatkgttaaaagcatttaaaaattggcaagttttttcccttattacaggaaaaggcactaaattttaaatatgtgtttttccttttagggtattataggtctctatatttgttgattaacagcaagcttccatcaagtattgaatattctgatttatctcgagttcctatagcaaaaattttgctagagaatgttctaaaaccattgcactttacttacaactcctgtccrgaaggtgcgaggtgagactggaatggatttattgattttgtcctttcacaagatctatatctgatggtaacttttacataggatgtgattttaaatatagacttgaaattcaggtttttactttattagtgttgatttagtttataggaaagtgtactttttctttctggcctgtagcctaatacaaatttgtgattctgataacatggttattttcctgcttttctaagtaactgtcaaaaattaacgaaaacatggtagttatcttaatagagaagacattaagtttactttaggttgatctagttgatattaaaatggttaacttggctaatttagaagagtagattatccttttagaaggatattttgaaaggtgattttaatcagtgattggatggacagtataatttgattttataaaaagcttctgtttttctttttcaggcaacaagtttttacagccttcacagaggagtttctggcagcaccttttacagatcagatttttcatttcatcattccggcgcttgcagatgcgcagaccgttttcccttacgagccctttctgaatgcactgttgttaatagagagtagatgttcaagaaagagtggtggagcaccctggcttttctatttcgttttaactgttggcgaaaattatttgggtatgaaatacaagatcttttttacctgaacacacatatgggtagcattggcagatgagtcaagagaaggccatgcagtggcaggtgttatggaaaggtgggcctctcctggargagtgtatttgctggagggatgtggtctgggcagtgtgttcctggggacagtttccagatacagtggaaaagactgacatatatatgtgtcttatgaggccacacagattattttaatagagttaacagagttaaatgggaaagctcttctgtgagtcaggcctgtttccctccctctgctaaatttccagtgtgcctcttctagaataacatcttcctgtagtatgtttgaaaacatacatacatacatacatrcatgaattattcatgaaagaaatataggaaaatgtgaaaaccaaacttttgggggttgggtgcgggggggtatatagagtctcgctctgtcactaggctggagtgcagtggctccatctcagctcactgcaacctccgcctcccgggttcaagtgattctcctgcctcagcctcctgagtagctgggactacaggtgcacgccaccacacccagctaatttttgtatttttagtagagacggggtttcactatgttggccaggatggtctcaatctcttgacctcgtgatccaccmgcctcggcttcccacagtgctgggattacaggcttgagcccctgtgcccagcccaaactgtttttcttactctctcactcaacactgaaaaattctgtgagcagaaatgtggggttttttttcccacacaccaagcaattcttcagtggacaccaactaggtattctacrattcagttcaattctgatgccgtccacccggagataatgtcagatcccatcatctgagggcttagtcctgcaagactacacccacttcagaggccgattacaagtagtaggttgtcacctatacttctgaccaacctgcaaaaatgggggttcctcagcccctccttgggattggtaattgactaagacagttcacagaactcgggaagtcgaggtgtgcgggaatggggagcttccatgccttctccaggcactccacactctcggcacctccctgtgttgagctcattgtgtcttcctgttgagttttatggtgcttcttctccagtgtccctcccacagacagccccttggaagttggtgcgtggggctgaaagttccaaccctctgatcacttggtttttctggtgaaaagccccattctgagtcccctagatggcctcaccataagtcacctcaagtatgatcacaaagggctggctatgaataacaagagactctttatctttcaagaaattacaagagttgtaggtgctttctgacatgaacggggacaaaatctaaatatgtttcctattataacacagttagaattttaaaaataagatctggtcagaaatgcctctctgcgtgtgaggaaaaatggcgtcttcgttttccattttaaaaaataatgtttaactaaaatacgttttaactgattgttttgcaaaggggccctctctgaggaagggctgctggtgtatttgcgggtgctgcagaccttcctctctcagttaccagtctctcctgccagcgcgagctgtcacgactcagccagtgactctgaggaggagagtgaagaagccgacaagccctcaagcccggtaagccccgtgccctgcatctggggggctgcgatgcaggcarccccgtcggatcttctagctttctgtccacccgtagtttcagttacacaagtcagaccctcaagcagcctttgcagagaagccccgtcagccccactaccacagtttctagtgatgggaaagtctctcccaccgctttgttagcacgttcatggaagtgtaaatggagacacatagctttgtgtttggttttttaggcaaaataggatcatactrtatgttaacttagttattaggaaatattttctggaagtgaaattgttgggtcaaaaagatcctttttaccctatcctgtgaacaccgggtagtgtcttccattaattcctgctgattttatagaggataaatgttatttacttaaaaattactttcaagttcttatctcttttcttccttactattgagtttacagtatattttcagggaataaaaaactttaaaattatatatacatgcatacataatttgtgttttacttaaagaatttaaccgccaatgactttttttggtcttaagcaattgaaatggcttgaggtatggctatcataagttgttattttttcattaaggagttttatattgattactactaagtgtaatcacagaatatacttgagagggtctcagggcttccaggtgaagtaaatttttagaatattgtgaagtgggtgtgtcagtgcagtgctgcaccttcctggacaaagagcttcactagtatcgaatgaaagagatcacagcaataagaaaaggatcgataagtcagctcagggcttgattttttttaaaaaataagagaagacaaagaaaggaacagaagatattcactgccagggctcatggctgaggggtgggctgatgacaaaggagtgaagccgtttttatagtggacagtggatgctggaactgttgcatctgtccaaactgtacaccaacaagtattcatttttttgtatgtttataaaaaagagtgggttctgtagatggaatgtagataaatttttgtttttggaagaaagttattaaatagtyacctcccatagaatttgtgaaattaaacccttatttatatgcagtgtattttgtattcatgtgaagatgaggctgtgggctttctcagcgagagagaggacaggtttttcctcgctgtgggtgtgcaaacacgatgaaagcagaacatgcggacccgtgaaccgggaaatcacctgcaggctctcactcgtgctcacactttgaacatttaagaagtgggatcagtttcttgatttttaaaattatttacaaccatagaaaatattactctatattcttttttaatacataagggtttcaaggtctgtgtattatttaactttatactttaattttcctttttttgtttattctcttcattcttcctttgtcttgggtattgtccacatttgggctgagaactaaagaccccattttgagccaggcactcataggtttcactgcaagtcattctttctttgccatgtctcttacctgtatgtttctgtgttgccttttctttcccctggcacttaattatataaaacctaatgtgattgtatgagatttttccaaggtcaaagttcacccttgataagctcttttgcctttaggtttctgtataatctgttcacttayagcttatgtacaatttattttaaaattgtacactacaaaaatagtagtgctaggattcctttctcattctgaystacttttgttagtcttaatgttaaagattcaggtttgacagatgaatttactgcttttatctataaarcagtgttttgtttggtaagttattataaattatataaattgtattcatccaagtttccagacaatacagtcagcaatacccaatgttatatatattcacattcatatatatatattcatatatacacatacatatgaaaaaagtatatatctttggttactgccccaaatgagtaaattgcatagattggcttgggttatattcagtgaatcaaatcttctggagagattaaggtataaaatagatttgtgtagcctttgattttaaaaaattcgttaataggctgggagcagtggctcatacctgtaatctcagcacttgggaaggctgaggcagctggatcatttgaggttaggagttcgagaccagcctgaccaacatggtgaaaccctgtctctactaaaaatacaaaaattagctgggtgtggaggcgggcaagtcccagctacttgggaagctgaggtgggagaattgcttgaacctgggaggcggaggttgcagtgagccgagattgtgccactcagtccagtctgggtgacagagcaagactgtctcaaaaaaaaaaaaaaatttatgtaatactctcacttattttgcttaaactgtgatctcaaattaaaatgaaaatgccattagatgatgatagtttcactatgtatggttgtcttagtgcagcttgatgtaaaaaaaaaaagtaggaaatgaagtttttttgaaatgtaaatactgaagctactgttatatcataggcaaaaaccgggtattcagagtttactgtgttaggcaaaatggatgcctactgttgactggatccctagaggatttcacactaagtgtactgtgatgtagataattttgagatgatgcctagctttctttgcccgaagaaaaatgtgatttcgtatatgtttgtagtgtagaggacgttccagttgagcacatttatggagactggttgttytggtatgttctaggaggatggcagactgtcagtatcatacrtaacagaggaatgcctgaagaagctggacacaaagcagcagaccaacaccctgctcaacctggtgtggaggractctgcgagcgaggaggtcttcaccaccatggcytccgtctgccacacgctgatggtgcagcaccgcatgatggtacccaaagtcaggcaagtgtccrtgggcgtctgtgccagggggtgccagccagagaacataccttcctccctgggaattgctctcctcttaagttttktctgctcttttctggtagagattgatgtaggatattctactgtccaagcgtttcataaaaaataatttgtgtttttcttttctaaaccaacaaatactgagaccttttcctggcccgtgaggctctcaagtaccctatctgtaatattttctgtagtaccttatgaatgtgagtttattcacccatctgaaaggctggactcatacctgcattagtgaaacactatgttacatatctttttaggcttttttcatagtactcgtgttttatggggtttttttttttyttcttcttcttcagacagcatctcactctgttgcccagagtgcagtggtgtgatcatagctcactgcagccttcacttcctgggctcaagcgatcctttcaccccaaccttctgagtagctgggaccacaggtgtgcaccaccacacctggctaattttttgtttttgtgtgtgtgtgtgtttgttttttgtttttttttttgagatggagtcttgctgttgcccaggctggagtgcagtggcgcgatctcggctcactgtaggctctgcccccctgggttcatgccattctcctgcctcagcctcccgagtagctgggactacaggcgcccgccacctcgcccggctaattttttgtatttttagtaaagacggggtttcaccatgttagccaggatggtcttgatctcctgaccttgtgatccgcctgcctcggcctcccaaagtgctgggattacagacatgagccaccacacccagccttcatagtacccttttaattagattgtccttgacaatttatccctaaaagtaaatttttgtttttcagcctttgaaataaacttttggttcagacaaaacaaaacctgcaagttaaaaatatggcctgtttgtgcttaaataattgtgacaataatcttgaactgttttctctccctccaatttgagtgatatgttagtggtttcttgagaatttaacagaaaagtattcaattggatacagagtaaaatatatgtagtagttctgctaggacccaagggactgatgttgcataggcaaaagctgtcagtaagtaagcaggtctgacgttaattcacgttaccctacagaattctctttgtttttataaaatgccatcccatcatatgaaaagagtgatttctgttggctaagaaagcattctttgaaatgaactgtaagtaaggaacccatcggttgaaatggccttgtaaacactaatgtggccaactaatgaggtgctgtcttcactcactggtgtttattaccatcggaggaagtagatgtcagtgaaactgtggctcctagattaggtccttagctctttgccggctaattgcatgagagcaggatgtgagatctgaggatcgcagcagctgaaccaggacacttgcttttattgtcgcacaacccattgctgtggatggtaattgctggatttcaatgcatcactgccctgggctgaggtttactagagaaccgcttccaaaaggtgtttaatgggtgaaggaactttctgtgtaggcttgattttatgagtacagcacctatttcctctaagaaactactctaggaattttatttatggcttaaacatattaggttctagtatttagaaagagcaagtaggcttactctaactgttacagattttaactgctttcaattttgatttttttaaaaaagtatttgaaagatgattagtatattcccaggctgataactcattcacaggccctcactgattaatattagtcccttttattttcagagttaggatttgccatttaatttctgtttaacactgattgtcagggtgtacaaatgaatgtggagacctttgtaccctgacatggaaagatttccgagacagatgcgtacatgaaaaccgggaagacacaggacagtatgtagaagaaccggcttttcctataagaaggatggaaaaaataggaatatatattcatattgcataaagaaacttggaagcatatacaagaaactcatgaaagtgaacactcgtgtctgaatatgccgaggaagctggggctggagcagaagtgctcttctgagtacactatttttatatcacttttaagttttggattaggtgaatgacttaatattttaaaattggttaagtaataaatgaattgccagctccttttctgagaggaaattttagatatattaccattggacgtggaaatttggatttaacatttttaatatccactattttaaaatatgattaaatattcactggctatattttaagggggcaaaaaataaaggctctactgcagtatcagacaactaaaataagaaagtagrctaccaaagatagcctgttagaaaagtgcttggctttcatctggcatacgtggggtttttagtgggtactgtttcagagtttcattgactgcatttgtgaccctacttacatgtagatgaggcctgcggtgcccactcagccccgcggcattcctggcctttgtgtgtatttcacattcctcgtccttccttttcctgactctttcaccggcttctttcatagataccatattcatgtgatttttcctttacttgggcttctcagtttcctttgtgggttcttttttcccctctttctcactctttcctaaacttctttttgtattcagttttttagggttgttagtttgtgacggagtcttgccttgtcgcccaggctggagtgcagtggtgtgaactcggctcactgcaacctccacctccagggttcaagcgatcctcctacttcagcctcccgagtagctgagattacgggcacccatcaccatgcccagctaatttttgtatttttagtagagatggggtttcaccatgtaggccaggctggtctcgaactcctgacctcaggtgatctcccgcctcagctttccaaagtgctgggattacaggcgtgagccactgcgccctgcttagttttttagttctttatttggtcctctgggtaatctctttcatacaagtggcttcagctacattctagtgactctcacatttgtgtctttagtttaagtaactttctggagctccagacacaagtgtacctgcttaataggagatgtccctggggacctctcctctgtcccctcccagggtctgaagttgagtccagcatctctccctcttaagagcctcctctttctgtccctgttttggtgaacaggcccgtcatctacttggttgtctgtacctgcagcctgaaactgcagtgtcctgcatggtagccaccagtgacgtgtgttttaaagtaaattaaatacaagcacagactcaggtcctcggctaccaaagccacatttcaagtgcccagtagccacatgtggccaggggctaccttattggacatcacagattagaacacacccaccctcacggaaggtgctggtgggcggtgctgcccagggttttggctcagtattcccaccatggtgctcgagagctgtattctctatgtcatggtttgccagcctgacttgtggaaaatacaaccctgattattgcattctcttgaacagtgtagactccctttgcttttaggaaaaaatycacattccttggattattgatttgtgcagtatccccttgttatcaagcatttgtttacctctcaactttatttctagcacaaaatactttttctccaaccataaatgaggcaaaaaggcatatcttgcattttcttgatcccattgcgcttttttatgcctccatggtgtttcgtgcccctttccttttgcgtatgccagtctcttccagttaatgtctgggctggcatgttctcaggggcttggctcttttaccccattgatggatctaaaagttttgaagcagaattttgaagatagtgttttaggggtcgaagaggttgatgttataatttgcccgtagtttcatttaaatacataaatcataagacacctagttttatttcaacatatgcttgatttttccaccaaaaagtagtacagtgaagcagcttaattatgtcttgtgttgttaatcattgtgatttagataaacagcggtgcgcctcgaagcgcagtgcttcttttctgtgcacgcgcgtgtgtatgtgtgtgtgtagtgtttgttggttttgtctttatttttgtttttgttttctgaaacaaggtctcactttgtcacccaggctggagtgccrtggcgtgatctcagctcactgaaaccccgcctcccaggctcaggtgatcctcctacctcagcacccttgagtagctgggacgataggcgtgccaccacacctggctaattttttgtaatttttgtagaaacggggttttgccatgttgcctaggctggtctcgaacacctgggcccaagtaatctgcttgtctcagccctcagcctcccagagtgctgggattgcaggtgcaagtcacygcgcccagcccctcgtgtgttttctaaccatttctttgccatgtgttttctaagaactgtggtgtatgtggtggggatgaatgctctttagctctgagagatttatagcttcatatcttatactttaataatttgggataaaatgattacacagatgacttcaaagcagaaaaatacagatttgtttttcrttgtatgtgtagaattaaatatatataccgtccatgtgtttgtaaacaagtttttataatattttggaaaaaatattgaggatgtgcctggagagagaagtaaattttgtctataatttcatagctgcttttattatcagtgatattttcattataatcaatagaattaataagctattgattcatgttaaaaattgcattctctttcatgaagttcaaataacattgatgagcttttaaacatttcagcacatagtgatcttaaaattaaatgtattttgaaatcctatctagattataaactaatttccactagctgttgttagacacatcaaataaataaaatagacttgccttcgtcagcttcagcaatatcattcatagttctgaatcttctaagaattcttagaacatttgtgaatgataattgtttcccgggaaatatgagtacacttggaagaagcatattccaccaaagtgattctaaatccctaccacgtttttaaagttttcttttaagcttgttaagaaatagtaagagaaggggcttccttttcgatccgccatctgcggtggagcygccaccaaaatgcagatttccataaaaacccttacggggaagaccatcaccctcaaggttgaacccttggatatgatagaaaatgtaaaggccaagatccaggataaggaaggaattcctcctgatcagcaaagactgatctttgctggcaagcaactggaagatggatgtactgtctgactacaacattcaaaaggagcttactcttcatcttgtgttgagacttcgtggtggtgctaagaaaaggaaggagtcttaccccactcccaagaagaataagcgcaagagaaagaaggggaagctggctgtcctgaagtattagaaggtggatgagaatgacaaaatgagctgccttcgtcgagagtgcccttctgatgaatgtggtgctggagtgtttatggcaagtcactttgacagacattattgtggcaaatgttgtctgactactgcttcaacaaaccagaagacaagtaactgcgtatgagttaataaaagacatgaacttaaaaaaaaaaaaaagaagggattatcaaagaagacatttgaggtagtgaatgccactttcccccattttaatttaaactgtagcatgagggaaagtatgttttttgaatctgtaaatcttttaattaaagaaaatcagttgccagtaagaagggctggctgtttaaattggttctggtgtcaatgctggaatgctagygcgcctgagtgtctaaggcttacctcctactcttagctcctagtttgtgaagagcaatttttagcagcttgtctccagacgaaatacaccttaaaatttttattagtaaggacattggaatttattttgaatcttgcattatctgatgcaaattattatatatctgttttattgctttttatggcattagaagtgtccagtaatatttttttaaaaagaaaaatttvagaagaacaaattattgcctttgtacttgtgtgctataagagttcgacagatcattgggtgtctcgctgtttcttttacctgtggcacctggacttagaggggaattctcagaggatgccatgctgtggtggccttgactccttgtgtgggagccagtgtcttccattgtgttctctttcataactcaagagagtccccgtggaaaactggcctgaatttatgacccggcttactgattaactcataggattgttacagctaaataaagcttaatgagtaatttttaatctatcccactatgtgggagaagaatatcacttctttacattttagaagtagagccccagactaaataaccttcagaaatttgtctttttttttttttttttggtgaaaacattctttattagtaagcagacatttgaaactttttgattacatgcatcatgcaaaatgactgacctcacacatggttgtctgttcattgtgacatcttttttgagatgattacaaatttaagatgactgcagtagtaaaaataattcatgaaaatgactctcaatgaagcaaaacactacatagcacacatgaaatactgttcatccctcctggatgtttaattctctcctaacgtaaatctctattttggaagactattatttacaaaaatggcagttgtttttgtatgtgcatctataggcactgaactgatatgaacaaaatttcaaataattttacaaggtttggttgttttttcctgttttgttaatccaaaacaggacaatgccctttgatttacaatgttcagttcttttaagaaatcattttcttyggaagatgattttgacccatgaaaaagttgttttacccctggtaatctttttgaaatggggctggctgttatacattatacaggttgttttcagttaagtgaaaaggagttgggcttgtcttgagaagaattcctctaaattatggcactgagaaaacttctctgcagtggtgggctcaccacttycatcctgtggtagttctggtagcactcctggtatgaaaaccctagcacaggtaatttcacctctttgaaataagcagtgatcctggagaaaggtgaatattccaaatctagtagcatattcaggtcatctggcagagaagtaggcataaaagacttttctaggtacttagaatgctgctgtaacaaatatctaaaaatggaaaagtggctctggaattaggcagtaggtcgaggctggaagaattctgaggcgcatgccagaaagaagccaaattgccttaaacagactgttagtagaaatgtggaatgttaatgctagggaggccttgaaggaagaaaggagtatagcagagaatacctcgattgcggtaaaatatctaaatcatcatgaatagactgttggtagaaaatgaggaatatgttattggaaaactggaggaaaaggggtccttgttacatagtggcaaaaagctaagctgaattgtgtcctgcagttatgtgtaaagcagaatttttaagtgatgacttcagtattagctgaggatatttccaagcaagctgtggaaggtacagcctgctgtcttcttgctgattatggtaaaatatggaaggaggtagataaattgagggaagaactgttgaatataaagaaactaggacttgatttgggaaattcgtggcctattcaaggcaaaagccactaaaactaagagattcactgtcaggacagccttctctagagaaagtgatgaaggtatggctgtataaccttctgctaatacttcagaaacatcaaaaggtctgagtatcaagtcacacaaaaggctctttgaggagattaagagtgtgaatcatagatcctcccagctatttcagaaaaagccaaaattagagacgggattttccaggaaagatatgtgaggagcctcctgtgtaaatgagtgaatccccatgacatatgtaagagacccacaagtttctcgacaatgttatagcagcagaaacaccactatttttaacagaatgctttagagaatataaaagaagaaacaaactgataagctgatactcagctgcaaacatgtgctaccttttgtgaaaaagtaaagatgattgagacagtcacaagcccagagaactgagcagtgagctgaagattactcccaggccttgaaactgaaaggagggtgcctggctggttttgtaaattgatggtgctgatggctccttttttcatcccaatttctgctttttgaacaggaatgtgtatagctgttactgtatgcctgtcacaccatcatacatgggagcagataacttgttttctaggttcgcaagtgcacagatggaggagaattatgccccagaaatcacacccagatcctctcccaaatktagatggctttagtgtgagatttgagacttttgagttggtgagactcagataagattttggatttagagttgatgctgtaataatgggttgtgacttttgagcacctatgagtgacgtaaatttatttgtgatggatctgaatcttttaacacaggggtggagtggtggcggggcgggggttgcactgtagtaggcaagaagaataatgttccatgtaaaacgttaatgtcctaatctccaaacctgtatgtaaccttaaatggtaaaagagattttgcagatgtaattaaggttactatggatttcaagacgaggcgataagcccagattatgcaatgggactaatttaatcatgagtcctgcagagaacctctccaggstggtgtcagagagatgtggtaacagaagggtcatagagatgaaacagtgctggtttttaagatagaaggccgcaagccaaggaatgcggatgttctctagaaggtggaatgacaaggaaataaataattctcctatgcaacgctgccgacaaactgatgttaaaagcaccgcgaaacccgtttggactcctaacctatagaattgttaagataataaatttgtgctattttaagccacattttgtaacttgttatggtggcaatgggaaactaaccagaagtgataactaaggatgaagtggtgtctgggaagaagggaaaccttctgacttcagaaatacaaacatttatgctggtagttctttagatctagtctgtccgacagaatatacattcctgtatttctacactagtcttgttctggagaagacgttctaggttgagcacatagaagagtgtttagtgtatatagtgagtttcctagaaaaatgtgttgaatgaataaatgaatgtgatcaaggcaagctctgggaggaactgtaattacttgattttaaaatgctgttgctgtttatcatatcttcttaagaattgctgacctttaggccaggtgcagtggctcacgcctataatcccagcactttgggagtctgaggtgggtggatcacctgaggtcgggagtttgagaccagcctgaccaacaaggagaaaccccgtctctactaaaaatacaaaaatgagctgggcgtggtggtgcatgcctgtaatcccagctactcgggaggctgaggcaggagaatctcttgaacctgggaggtggaggttgtggtgagcggagatagcgccattgcactccaggctgggcaacaagagcaaaactccatctcaaaaaaaagaattgctgaactttatgtgtttctgtttaagttcacagcagtcataattctgcaaaatacaaggcaaaactgtcgtttctgatactagtaatatatctaaatcagtaagtaaaaaggatgtgtaacatcttaataggagaaataattattgtatgatcaaacaatttcaaaatcaaactagacacttttcagtatttactacagacaaattttcaacttatttgatcaaaagatttcttaatggctgttagtcaatgctgcatcaagaaactttagtgcaaattttaccaaatgcatttatcaaaaaggggttttcatttttttctgcaaacaaaacattaacactaagtatgtaacaaactgatttgcctacaaatccaaaaactatcaacataagccagtccttcaactaaaaactcaaacatacttatcttaaggtctattcctaatccagatttgtctatattcaggttggaagacagaataacartaaaaccaaaatttatctgtaaaaataataaaaataatttgtttttttttttttttaatgctggaggtattgtccttattaatacgacacatcatctgttcccacatggtactgcatggataggaacaatattattttagttgatggagtaacacagtgttaagaatatctgcttctagcagtgtcaggctttcatctgttagctctttattcggaaatgaagtcacaagaataaagtcaagagctgcaaattcaggacaagactgtacaataaagttccggacatccaggatcctgtgtgtactattgaatctttgtatcaaacractcccatctgctaacctgatttgaatttttgttgttggcactgaatcatcaataagaacaaccgygttaagtattgatttatcctcctcttctggagaggaaggtgtactgactatttcaggtgtaagccttccaagtttttgcccttctccactaaaagccttgaacctcaatctagrttttatgtattcttgatcctgatggtcctccatatcccaattcacttggccaccatgaacaaggcactgaagctccagggggatctctcctcttttaacaaactccagaaattgagcatttgttggttcattgtaaggtctcaattctccatcawctaaactgaaaccattgctccacagtttaagcaaaatctgaacatcttgtagctgattttctccatgcatatattcagaccgcttacaaaaggaattacccaatctgtatcctccacctgtaaatgacattgaggtggtgtccgtgggctcttgaagactgcagctttaggtctgtcagacttggaagatttgcgcttcacttcatcttcatacagttcttccaaggccagtttatttcttgatatgtcatccctttggctgttttcaagtttctttgcaggttcttcacattaagttctgcaaatcctgtgcgctcggaggccacagcctggaagatctcctctcctgctcaccgagctcagggccgccgccctccgccatcttccgctggctgtatttgtctttttttttttatttttttcgacagggagtcttgttctgtcacccaggctgaagtgcagtggcgccatctcggctcactgcaacctccacctccaaggttcaagcgattctcctgcctcagcctcctgagcagctgggattacaggcatgcgccaccacacctagcaaatttttgtatttttagtagagacggggtttcaccatgttgaccaggctggtctcgaacccctgacctcaggtggttacccaccttggcctcccaaagtgctaggattacaggcgtgagcacctggcccagaaatttatttttaaaagtttaatagtttgttttattattgcttattgagtgatttagtaaatattctgtcagggttagcttgaaatacaaattttaaaatgtgtattttaaatgtgtatttctgaaaatggtatttcagaaatatgtatacattcacatggaaagatgttaattataatcttagtgacaaactcttagaacctgtaggaagaactcatttttgtttctatgtctacacacaagggtctggatggatttatagcagggtattaactgatgatttctgggtagataagatgccatgtggctaacattcttttgccttgttttgttttaataacattttttaaaaactcaatttctcaactgaagagaaaataagcaaataataccttttcaaattattttgaaagttcgtatttttcgtagcttttttcttactcttttttccgtatgactgttgcrtattcttagcaaataaaactccacaaaggcaagaaaaaacgttaacactcttatcaggcatatggtaaggattttaaatatctcagagatagggtatctattatcattttctaatacagcttcccttttcaacagtatagtctttttcagagtgaattttttttatttttattttattttattttatttttttgagtctgagtcttgttctgtcacccaggctggagtgtaatggtgtgatctcggctcactgcaacctcagcctctcaggttcaggcaattctcctgcctcagcctcctgaatagctgggattacaggcgcctgccaccacgcccagctaatttttctatttttagtagagacggggtttcaccatgttggccagtctggtctcgaactcctgacctcaagtgatccacccgcctcagcctcccaaagtgctgggattacaggcgtgatccaccaggtccrgccatatttcagagtgaattttaagtggaaatttgctcgaacrttaatgacagacagcatacttagttacctgtcttaattggtctcctttaacttgtattattaccattttttcgtttttccaatattattaaatatttattattaagtaatattttccaataatattaaataatatttgttggagaccccgtttgagattctgctcttactggaatgaatgcagtgkgcccccactttgtcatggcgtgtgactgataaacatcatgcatgttttcataaaatcataatacttctgagctggaaggaccttagaacagatgtatcactgccccttcattttcttatgcaaacattgcttttagcctacatgacattggaaagatggctgggctgaatgatctaatagattctttctagcttaaggtttcctgattctaggaaatttcacatgctctttcatgcttttactgttttttcagtgatgtacccttattgccatctggatatctcaaaatgcattacattaaaataagaatggagtttagttgttgtttatttttaatcagtacttcatgattcctatggtgtactcagaaagtgccaatatggaacaatgcatttgatgttttggattgagtgcaggaaattactcgaccaatcaaatatgagatttttttattggattttgaaagacctcatctcttaaaaaaatatttatgctagctgattacacarttgtggctagaatgtttatcctgtcacaaacatgcagtataaaacagagctaatttaaatgctcatgcattcttcacaaagttcatcttttttaaatctaatattatagaggaaaagtttttaatttttatttatttttattgttttgagataggatctcactttgtcacacaggctggagtgtagtggtgcaatcttggctcactgcagccttgaactcctgggctctatcgattctcctacctcaacctcatgagtagctgggactacagccaccacacccaacttttcatagagatgaggtctcaccacattgcccaggctggtctcaaactcctaggctgaagcaatctgcctcctttggcctcccaaagtgctgggattacaggcatgagccaccgtgcctggcctaaaaatctttaagatacatttttttagatttatttttgagatgttaacagcacattttttgtatttcaagaaaagtgacttgagtccgtcactaaatattttacaaattttaaacgtgttaagtaggccaggtgcagtggcacacacctgtaatcccagcactttgggatgctgaggcgggtggatcacttgaggtcaggagttcaagaccagcctggccaacgttgtgaaacctcatctctactaaaaatacaaaaattagccaggcgtggtggcgggcacctgtaatcccaggtactcaggatgctgagacaggagaaccccttgaacccaggaggtggaggttgcagtgagccaagatcgtggcactgcactccagcctgggcaacagagcaagaccctgtctcaaaaaaaataaaaagaaaagtataagcagtaataacaatagtaattataatattgtgatatattaatacgatatgtagcagagggggagcaggttcaacttgtgcatgaaaacagcttatatctttatcttttggggtaggtctcacagccacaggggagggagggcgggctttcctagcttggtaacagcacagatttacacctttgggagccgtgtctcggtgtmtcatcaaatggctggttgtctgaggcagctttttgtggtattagtacagagatttgctaaattgtaygttgatcttcagtgtatcgctttttttttttttttttttttwagaaatgttttgaataagtaattgctttactgttctgtgtttttctcctattcctttttaggcttctctacagtttagcctttaatgccaggtttctgagacatctttggtttctaatatcttccatgtcaacacggatgatcacagggtatgtattayacagacttataaattgagctcaagggcacaggaagtggcagcctaatcaaaaatgttgccagaacctgtttttaagtcctgtttatactgggcttatttcatattagaaggtaagttccagatggtctcagttgcacaaaaagaaaaatcagtgtctaatcttaacagttacttatctgtatatattatagagagtatggttttatctgaaggtaagtttcctttaaacatcctagccatgtttttaaaaaagcagacatttggaaattgctttgctccatatgactttactcctcttttcacagtgaaaatacagatttgaagtaaattaaagactgctgcaaacattagaacagtgtagaagtttttaaacatttgttgaaataatttgatttttcttatttgaatcgtgtaatttaaaaaatatcatctttgacttaacatattttaaytgagtatgtaataggtaggaatttcatacttaaaatccttcatggtaaactgacttagcctagtactctgttgttgaatttttcctctgccagaagtctaagccggccgggcgcggtggctcacgcctgtaattccagcactttgggaggccgaggccagcggatcacctgaggtcaggagttcaaaaccagcctggccaacatggtgaaaccccatctctactaaaaatacaaaaattagtygggcatggtggtgcgtgcctgtaatcccagctacttgggaggctgaggcaggagaatcgcttaaacctggaaggcggaggttgcagtgagtcgagatcatgccactgcagtccagcctgggtgagagcaagacttcctctcaaaaaaaaagaaaaaaagaagtctatgccaatccccctgtgctgtaatcggaaaagatgaagtgtgtaattcagttaattggagactaaacttacaagatgcaactgtgtgtcatgctcatggtagtagtgataatagcagtcactgttactgactccatgctgtgaaccagctcattcggtggtgggaagacacatctcagttgtagggcaagagtgtagaaagtggtcttgttttctttttaggaacaagaagttagaagaaagaatttttggtgggttggggtggtatatctaaaatataaacacactcatctgcaatctaacttgctgtgtgcagtcataatgaaaactcttgttgagatttctggattttgagctttttcatgcaatatgtagagcaaaagatattcatatgttgttcagccaggcacagtcagcccctttatgatgggactggtgttcaaatcatctggacaaaacagttcatactaatgaaaggggaatgtcagtttctcaatattattacttcaaatttttcatttttttaattgaatcttaagtgaggaaaggggagttttactgctgccgctgtgactggtgaaactcataaaggttaagtgagttatcttgcatcaacagtgggtggctaaagcagagacaaaagactcctasaatgatttactgtcttgagaaattcttttctttcatttccaaaccaaaatacaagattttaagtatgttttgttgtgttttttttggtgcatttcagccacttctgactacgccagctttggttttcattagtgacaggtttgttttgggcagaagggaattgagaatcattaggacaggaaattatcgtttacccataagtgccycagcttagcaacagaaacactgtcatagttctgcctgataattgcttatttgtttatggcatttgtctcttgctaaggaaatggagtcatggtgtgtgaaagaaaagtgggatattgttaattatattaaattattaatactattttatgatagggtagttttacaaatcttattaaaagacagtttgataatttgaatgtctttttacttgtttattagaatgaagtccctcaagaaactgacagtgtattaatgcgttcccaatacagatactccttgaggtacaatggggctttgtcctgataaacccattgtaagttgaaaatatcataagttgaaatgcattcaagacacccagcttactgaggcctcacagcttagcctagcctacctaaaacgtgctcaaaatatgtgcattagcctacagctaggcaaaatcatcaaacactaggccaattttataataaagtgttgaatgtccatgtaatttattgaatattgtactgaaagcgtaaaaacagaatggtttatggatactcgaagtatggtttctactgaatgggaatcacctttgaccatcttgaagttgcaaaatcctaaactgaaccattgtaagtcaggcaccatctgtaaatgtctcatatttcctactgggaataaagtttaaaatgaaataactgattttctgaaactggcactcaatttaagtcaaaaatagtttaacagtaaggcttgcattgctaggacttacagctttagtgggcagaagtatcatcaggggagcgtgttaaaatgcatattctcctgagacgagattgcgccattgcactscagcctgggtaacaagagggaaactttgtttcaaaaaaaaaaaaaaaaaaaatttcagcttctctgttcctgccctaagacttgggttagaaaccctggagactgcaacctcacaagcttatcaggtaatcgaggtacagatggtttgggggccaaccgagaagcactattcttcaccccagtctagcagaccacatttaaacaatctccagatggatagtgaattttgacacatcagacattttgcaaataacatctttattcatttacctcattttcagtacttgctattgaaatcagccagtttagtttccttcttcttgaagatgagggaacccatagccagctggtactgttttccrttaggcatcccttgactacaacataacatagagatgctttgcccagatgtcttcagtgtgggcagtaggtgctggtgttggctgtttgataaataatctcaaaacagtctacagtagtattctgaaaacctgttaaagcaagaatccgttcttaaaagctctttgcaagggtgggggacattggacgaggaggaggagtggttcccacaggcacgcaatttgaaarcccttgttctcaagatctagacagaggttagggattgcctcgggtctcactgatggtcagtaattcacctagctcccctgagttatgtgtgaatcagtgtcttttccattacagtaagttgcagactttatttgcacataagtctttgagactgacctgttttcagaggaatatttgagtcagtgtttatagcagaaagaatggtcagcagagaactaagagacctgtgtctcgtttgtgccctgtctgcagggcagcattggcacatatccttgccaatcccagtttttgtcattaaagtaaaaatgatgcattccttttgcttgtttcacagggggtttgaagaggacaaataagtttttgttggttaattaccctgtcccttttttttttggacccaatataagaattttatgcatcctgcaatatgtgtgcataactgatgatgtgttggtggtgatgattcttgtcagggataacagtacaagtacaaggattcttgtcggggataacagtggaaagcaggctcatcaagacgcaggagtgggctccagctgtcataggcagggctgttgaaagaagccacccctgtccagttaaggcagccctgtgccttttttatcctccatataaacaacctttttgtgtcatcctggctttggcaatgaggtaggacaattgtgctttgtccctttttgaatgtcccacaatgtttaaattttggaagaatggcattcattcattgatgaatctgttcagcatagtgctaaatgcagagtatcacaactgcaaacatggatcatgtatgctcaggttgtgtagcatgtggacatagtgtatcttctctgtgggaacacagtttcaggtgcacatatgggttcctkttctcaaagcggttgatgatggcagtgccctcccctgaaccatgcaccatggagactcagaagctccaggtggctcagccaagctccttacggccccgctaattagaacaagtggccttaccttctgctttgctttcatacatgatttgtagatcctgactcctggttacatctcatctaatatatacctgtagttttgtggaaatggatatttggggagataagagagtgatcttgctcacagtgtctgttaacctgtgattgatttgacttggtagaggggaccatggactttatagaaagagcttgcaggtgagcctattagctaaawgttccataagacaaggaaccagacttaaaaacgagagaaaaggaagaagttctaggtgaaataagtcaatttaatatatcgtagctcttttttatttatttattttttttggaaacggagtctcgccctgttgcccaggctggagtgcaatggcacgatctcggctcactgcaacctcygctgctcgggttcaagtgattcccctgcctcagcctcccaagtagctgggattacaggcacgtgccaccacacccagctaattttttgtatctttagtagagatggggtttcaccatgttggccaggctggtctcgaactcttgaccttgtgatccacccacctcggcctcccagagtgctgggattacaggcgtgagccaccatacccagccttttttcttttctttttttttttccttaatattttaaacttytttgaaacagagtctggctctgttccccaggctggagtgcagtggcgcaatctcagctcatggcaacctctgcctcctgggctcaagccattctcctgcctcagcctcctatgtaactaggaaggactacaggcacctatcaccacacctggctaattaatttaatatatcatagctcttgatgggtgaaaggctgctgagtaaagaccaccttagctgctgtgaaagcaggagcaggatgggagctggtgaataaagtggacagtgggagcaaggccaccatagagaactggaaactttgtttcttgaggttccagtttggcttcaatattgaatagctttcaacgttaccaaaagttaagtcgctggataaatttttcctgagaccagaatgatttgcctttattaaatatgttgagtagaagggaagggggatggtttcctcataagagtaaagtacatgtgtgtcttgaatagtggccttattagagctcttcttagggccttagtctgggaacgactggcttactcttagtaacttcattatctagttggtacaggtagcagaaaccttagtgaagattaatgggttggtatgctattttttgtattaatctatgctgtttattaacctgcattgccatggtgactttaccttgcctttaaatagtttaattcctaatgcaaatgttactttccctgattatatttgtttgatgttatgttttaattagttcccaaactaagactaattttaaagtgactggtttttttcttcttttctttaattcaaggkctatggtaccgttgcttcaggtgatatccaggggttctcctatgtcttttgaagattctagtcgaatcatcccactcttttayctttttagctccttgtttagtcattcactaatttccatacatgataacgaattcttcggtgatcccrtagaaggtaaggattttgagaaaycagtttgctgctggccacttggcccatcagttttcatagacagtagaaaagttttaagctttttaagtctttcagtgtgtgttaaaagatggaaaaagaarcaatagaaaactggattgtgttttttagttgtaggtcaaagacaatcatcaatgatgccttttactttagaagagctgataatgttgtctcgatgccttcgagatgcatgcctggggatcatcaagttggcttatccagaaaccaagccagaagttcgagaagaatatattacagcatttcagagtattggagttactactagctctgaaatgcaacaatgcatacagatggaacagaaaagatggattcagttatttaaggtatagagtatatgtatttttttgtttactgacattgaaaaatgtacaaacttttgtcttgactcgttgcagaggaataaaaatgcaggtttgtttcagacatgttttaatttgcaagactttttttttttttttttttttttttttttttttttttgatacatggacttgatgtgtctcccaggctggagtgcaatgacaccatcatactccactgcagccttgaactcctgggatcaagcaatcctctcacctcagcctcctgagtagctggggctactggcacatgccaccacacccagctaatttattagtttttttgtagagacagagtctcactgtgttacccaggctggtctcaaattcctggcctcatggattcctcctgcttctgcctcccatagtgctgggattataggcgtgagccactgcagctggcctatatacctttttaattaagaaaagtaattttagtacttttgattaattaaggtaatttaattaactaaaattactttcattttaatttacatttgcctcacttaaaaccatgtttttaaaccttgttacatgcatcttttctatgtggccctaactacttaactgtgacacgatgaaatataaatacagtttttaaaatgtttttatttttcactaaatatttcttagattttattgttttttcaaacctttcaaaaattgattaacaacgtaaagtaggtcattaatttttaatgctagttgtatataaattattttaacatatcttcgttcttaaccagaaagtgaagttttgagttactgtggctggaatgttggcaggaaaccaccaccagtgagaatgtaactgttgggatggaaaaaaagaaaaggaaaagggtgcttgacttcccatgaaatttctgcagcaaacacatctagtcagctaaaattgctcattaaaggagtgagagcagaagaaatgcattttccaaattgaatgctagatttacagtccgtttaataccrgcgacctctcgcacactaatgttcagttcgagtcatcagctgtccctttgggtcttttatcactgcttttgtcaagctatctatttaattgaaagaagttaattgaatgaaaatgatcaactaagcttgtattaatattgctaatggaactttcttcttggccatgtttggagaaagatgtcaagctagactttaggaagggcccattaatgcttgcacttaacctgatgggctaattaaggaatgcttattcatcctccaagtccacgagagtctctctccagcccgttctgcctggttttacaacacatttctcttaggagcatgagcattagcagcagcagccgtaactgataatgttttgattgcactgaatacagtcctaatgcatcgttgaatttataatttgggcagattgatgtaatatatgtttgcacaatttattttaattacctatttctgtattcctaagtaaactgggacggtcacatggtaagcctttactatatcctttcttaaagattgacaaatttgcaatttttctatgttaaaaaataagcagtctcacctatttaaaacttataattcttacataagcttttcctggatgtgggtgttaacggtagcatatttgttttcctttcaatatttgattaaaccctggggtctttgttaataaagctttccatgatgtgcaatatcaggtgttgtgtatgatatcagataatttcactgttttatggcayctgttgagagtttcataatttccrtgacaggcttatctttagtatgtagaaatctctgaacttaataatgccatataagatattttccaccctggccttattttgttttggttaagcgttaaatgaaaagtttgtacagaatttttttatgcctcaaaatgactccctgccactttattcatcattgaaagttttaagagttagggcaaggccgggtgtggtggctcacgcctataatcccagcactttgggaggccaaggcgggtggatcacgaggtcaggagtttgagaccagcctggccaagatggtgaaaccccatctctactaaagatacaaaaaattagctgggcgtgatgyacgcctgtaatcccagctactagggaggctggggcaggagaattgctagaacccgggaggcagaggttgcagtcagccgagatagcgccactgcactccagcctgggcgrtagggtgactctctctccaaaaaaaaagagggtgaaaatttaccttttttttgttggtggtggtgattgttttaggtttgaaatcaagttgttgtaagaccttttgagtttagaattgtttaaagacctttttttttttaaaggatttctgttctttggtcacctgtcccccaaaccattttatgctacctgctattgagctgagcccccaaaataaaaatcactgcataatttttgagtaatcagctgctgttagctgttcttttaagaaaatactatctctattatgaagttgtatgaacttacacctctgtagttaactgtgttttaggcagtattctaagagttttgcatatattcatttaatacaatagttctgtgagaaagatactataatttgttttacagatgaggtcatgtatatgatggtagaaccagctgctattctacactccccttctgaaaagaatacaaattgtatcagcatttttcatattattgttgtgccaaatttgagttgaagaattcgaggtagaatcaaccaaagaacgcagaarcgtttagcccatgatctcctgcctyccattgattttgacagaattgcaaacgatgagacctgactccttcaacaccgaccattttcatttttcagtcctatcatggtcctcccaaagtcatttgtgtgagaggctctgctggctggtcacagagcatagaattttaagtggatagagtcatctttctttgtcactgtaagaattgaggtcactttctaagccctgtcttgacactgctaaaacagtttatgcatttatcaaatttataaactcctcttgaagtgtaatttagagctataattactttagcttgatgagataggaaatcctgttttgagatgtctgtgtgcatccaccaaacttaacaggagttwcctcctgtgatagggaaacaggaggaagtggcagggaatgaggaggaaggttcccatgccctcattatccatatgtctggagagagagagagagagagagagagagagagagccatactatgagtgatttttttacttccttagtggttaagttgtattttttcagttccaaaaagctatttttaaaaagtaataaagcaacagcagtgccctgttaatataatcctaacatgcgrccatttgactatgttacaaccaagagatccaaagcttgtagcgctgtgccttatccttttctgttattgaagattttgattgattttgtttttgttttttgactactaaagtggatgctatatgcagtaattttatagtgttttaaatatgtgctgaagaatactgtttttcaaaatactccagtttttaacccgtttgtgccagaggttgcgaattttttgtgtgaaaaatcaggccttggcaatgaccttgagcagtagaatataaatcccacaagcttagcgttccagtaatggaacactaggcataaatgggttaacaagtggtaactaagggctatataaaatttggttaacccttgacagcagcagtgcataccagatacttcatgactttcataggttagagtgttttattctcagttatttgaacactcacagtattcatcccacccatagtgacacagctctatgctaagggatcataaatgaattcacacagggtgcctgttcctgcagtatcaccacgtagtgaaggagacatgcattcagctaatgacagtgggaaacagcaaaccacagaggccggtcctgtggaagcacacaggagagaagcaccagctgctgcgtcatctggcacttgactcacttgaggaaaacggttgttttccaacgaggtcatgttcttagagctttttctgacatgttacttttatatattcttcttatgaagtcaaattgtaaaaatccattctcatttgatgtatttcccacattrcacatttattgcacttcagaacctggaaattgtatgctaagtatgctttgtattttgctttttaaagaactaactcatctggtttcaggactagatctactgtagaaagaaaaaaaaaaattaactcagttgtttggttttagttaccagattttacatatcacatttaagataaaaaagatacttttattttatgttatgatgcaatttagtctttcagttgcccttcaaaacttggactatatgtacttaattttttggttgcaatactatatctaaatatccgtcatctccatacagaaatgtcacaatttaggattaatagccttgtcatctaatttatatatacatttgtgataatatagctagtgcgtaagaatatttccccaaggtcagttaagcaagattttcttatgatcatcattgccatgaactctcaaacatagcgatcttgtgaaaacagtgcctgttaatttacaatgtttaccttgaacagttgtcaagtgtgatttttataaggagttggtatgtttctaagcagttatctacttgatctttttaatattggggttaagggaaacctgcttacagcatcacctatttttcattcaaatggcacataatagagcatgtgtaacagttgtgtacctttgtggggtttttttgttttttgtttttctttttgagacagggtttcgttctgttgcccaagctggagtacagtggctcgatctcactgcaacctccaccccccaggctcaagtgattctttcacctcggcctcctgagtakctgggactacaggcatgtgccaccacacccggctaatttttgtattttttgtagagatagggtttcaccatgttacccaggctggtcttgaactcctaggctcgagtgatctgcctgcctcggcctcccaaaatgctaggattacaggtgtgagccaccacgcccggcagtgtgtgcatttctgaataaatttattagtacttgaataatgtattagtttctgcatttatttaatgtaacgttttgatctggcgtggaagaacatgagaggaggcacaagrgttaacacatcagatggacataatgctattgtatttcagaacttaaaatccactaaaatttgtatattcagctagatacagctagttgttccagtgtttgctatcttacttcatataacttaccacactggttctcaagtcgtaactacctatcagagtcatctgggggagcagttgaaaactcgactggctccacctcagactaattgaattggagtcagtgatggcggcacgcctgtggtgggcttgtcttagtgctccaggtgattctaaaatgcagcaaaggttaagagccacaggcctaaccctgcagataactcactttgagcacatttagtcactttatgtgatttggcatggttgcctctacaaactttccctttttggtgctagatacttgtagagcagttgagtttgtgattctgaaagtgaatgtggaaaaaaggaatgtgttaaggtgtttcgagatcacaaaatggatccagtcaaattttcatgtttatatttttcattaaaacttaggagaaaaatagttgatatgaaggagggaaaaatgttctcagttgaattttaaggtttggtatttgatattctaaataagtattttgggaattggtccgggactagtcatgccatatttagcaaataaaaagacaggtcacctagttaaaattgaattacggataaatcacaattactttaaaaaatgtagttatgtcccatgcaatattgtggacatactttaaagaaagcaatattttggacatacttctactaaaaatgtattatttgatataartaaatataaayatattatttgatgtttattaaaccatccattaccacagtgccgtctatcttgatatcccatccttaacataactcccttggctggactcacttttttaccttctcctttcctcctcctttctccccatctccctccaccgcctttttttgattgaccaaggatccatggtactggcatgttatattggtaacatgtgattacttcttttttcatatttaggataggaaatatgaaagaggatacactatattgaaatttttttaacatttaattgtataataatttagtagaagaatgtaaatgagaacttaattgtctcatataatttgataatgtttgtaatctgtagaaaatatatgttctyatgaacagagattgaatagaaatagatatctaggagttaggcagacctgatctttccgttgcctgacctggagcaagttaccccctcaataaagctaagtttccttggggatgataaattcatggggaccccaggattccatgggatgatgcaattaaatatgtaaatatgtcagaaaggatgacctttgttaacggttggggtgattatgaaagggctaatttcagcatggtaactattaaatctggatttatttaaagtatcaatttaattggtcacaaaaatggaaagaccagacacgaacatcttcatacaaaaagattgtacttctgttccttttagaagggtgtgtgctctgtgtggactacctgaatttatcccatacaaggatagcacatgtaattagcatagctcattgagatttcatctttgcttttgaagagtaaaatgaatgactttcaagaattagtgtattaggtcaatgacagtactttgtttcagccaaacagttaaccagacagaactaataatgaggctctccccaggctgcctaggctgcataagaaaccattaattgtaagatgttgtatgtgcagctaagcccctgagcaacaccatagagtcaagggtcaaggaatagctgactccagtttaccctgattagttcactaaacatttccactcgttgaagaaggacggtatttccatagcgttgtgataggttttaaaatgccacaagagaatcgccacttctaaattggcacgaaatacccaccacttataaaggtgcatctttgatcttgagtgggtttttactatgcagttttatctgcatgaccaaattgctcgaataacactttttctctgtccacgggtaggtcattcaaggggtgtccacattgtagtggcctgagatatcaacccaagtacccttccccttttttcttgggcacacagaatttctggtatccctgcatgccttggatttgcatttcataaaataagcatttgtatttcattgtatgtaaatgctaaattatggaattttaaagggaaatctcaacaattgattgtgtgatctttataatgtataatatatccagtatagattagatatattataaatttatatattatatatactagatacatagtatatattatacaatttataactataatataaattatataaattagtatatatataatagatatatattagaaatgttatttctaatctagccggtgggtatattataaatcagattgtcctgattttgttttttctgtggtgatttccgttgtctttaattagaggcagcatgcatacaggcctggccgactttttcagaaaacgccgtcttgagctctgtagtagttatatgatccaatcctggttgtagacatttaaaatgttggatttacaattttggtttatctttgtttattacaaaatgcatttctattcggtagagaacttcaggtctttttaaagtaatgctattatatctctttaatcatgtattataaaatttacaattattgatctcaagtcagtcatttagtacctgctaggttccaaggtggctagttggattctatttgtgaggaactcactgcacaacaaccagagaggaactgttctgaaagaatattgtaattttttaaaaccataataaaatactaagctgtgatgacatagtgaagtgtgtccaggccagcctgtttggaaaggttatcaaggagatcagactcgatttttctggagttawgatcacagatctgactccatttgcttacgtgaggcaagtgctgcaattgttttctctttgggagatgtgacagtgatatctggggtgctgcttttttcccctagtgccgttagtacattatttctcagaaaactcagaaatactctttcaggaaaaagttgtacaaaattgcaccacttagaggtatctttcattagaactcagatgagctaagacatttccarattcgtgggtttttttttttttaatattttaggtttgggggtacatgtgaagttttgttacatagataaacatgtcatcggagtttgttgtacgcatccttagatcactcaggtattaagctcggtccccagtagtcatcttctctgccctctccctcctcccaccctcccccttcaagtagatcccagtgtctgttctttccttctttgtgttcatgggttcttatcatgtagctcccgccaaatttgtgtttcaaagcttaatcgccacctccgttgtaacttaaaaattatcatgtacatgtgtttgtgttgttctgcacatatttgttggcagataactgctttgtatacattattgtgatggcaaaaagaagcccttttctgtgagcgggtttggtgtccggctcgacctgggttcctgcaccaccgctgtgtgctcctcctcgagtgaatgtrtggctcactgtgcattgtgctgccgagctcacgtgtgtgacgcggatatgttctttcttttcaggttatcaccaatctagtgaaaatgttgaagtccagagacacgaggagaaatttttgtcctccaaaccactggctgtcagaacaagaagatattaaagcagataaggtgttattgaaagatctttttaatatttatcattaaaaaatacattcagcttgtgtctttctggagagaagaattaagcactttaaaattatttattttatgactcatatgactaaatagtaatgataaaccttattactaactcttacgccaacttcttaatggaacatatagcagtatcattgacttaaaatgatattctgagttattaatcctcaattttcctttttaacctgagattatattaaagccttaatgattctttgtgaggttgaaaaatattttgcttttattagtattaatatatgtctagtatttaaaagagatagatcttatacctaatttttgtgattttttttttttgagacggaatcttgctatgtttgcccgtggtggtctcaaactcccagcctgaagtgatcttcctaccttggcctcccaaagtgctgggattacagacgtaagccaccacaccagtcctttatccttgattttctaaaagaacagagacaaatttgaatattactaatacctacatctaaagcagattcagtagtatgatacgttagtaaaaaatttaagtggccaggcgcggtggctcacgcctgtaatcccagcacttggggaagccgacgggcagatcacttaaagccaggagtttgagaccagcctggccaacatggcgaaaccctgtatctctattgaaaatacaaaaatcagccgggcgtggtggcagacgcctgtaatcccagctactcgggaggctaaggcaggagaatcacttgaacctgggagacagaggttgcagtgagctgagactgtgccattgcactccagcctgggtgataagagcgaaattccgtctcaaaaaaagaaagaaaaatgaaagaaaatacaaatattagccgggcatggtaagtgtccccctgtagtcccagctactcaggaggctaaggtatgagaatcccttgtgccctggaggcggaggttgcagtgagccaagatcgtgccactgcactgcagcctgggtgacagagcgagattctgtctccagaaaaaacaaaaaatataagtgatgttaacagagggacataaggtattttcagttcttgagaaaaagtcgtaactggattcatttcagaatcttgggagtaggagatggagtggtggagggtataaaagaaaccatgtcggctgggcgcrgtggctcatgcctgtaatcccagcactttgggaggccaaggcaagtggattgcctgagcttaggagtttgcgaccagcctgggcaacatggtcaaacccagtctctactaaaataaaaaaattagccaggcacggtggtgtgcgcctatagtcccagctacttgggactgaggctgaggcaggagaatcgcttgaacctgggatgcggaggttgcagtaagctgagatcacgccactgcactccagcctgggcgacagagcaagattccgtctcaaaaaataaaaaaaaaaaaccatgtcacagaaatattcgaggagagaaaacaggagtgtttcagaacaattttataagcatgactatgtcctcataagatatttgtgagttaagcctgttgcwtctaactctgcccactgacaaggtagagcaatggtggcagatcccccagcagtgaacagttctggggcccaggctggggttgcttcacagcaaaagaagcagtcctggcagggtgcttggctccaggtctggggaagaccctgcaagatgggtgtggagtgctctgtcatgctggagagcgaggaagctattgcagggtggctggggctgggagacagggttaggagcctgtctctagctggtcatgggcagaaacttgaagcattcatgaaaacagctaactctgagttcgcaagggtgctaacaaaacccttcgtcatcatatttgtaggatgcaaaggaaccatctcattattttgaatgctgttttgaaaaaaagaagtactcaagcatttaacccacctttcatttataaactgtacctcaggcaaaacagatagtgtgtgatcttttgcatagaagtattccagccaatactacatgaaaaggatttttgcaaactagaatcagcctgttgcaggctctggtgaaggagatgaccagggcggtgccactccaggtgcagcgcatgtctagggtctgctggtctgagatggtgtgttggcctcccaggagaggagggtctggtcccagaatgcaaatagctgcacctcttccttactccagaaagttgtgcratgggaaaatgtcagctgaacccagcagtgtgcttagtgatttaattgatttatattttggcacaagtcccttatctcatcaccagctggtagtacggtgcacacacccacacttgaagtaggtttcacttctgcagtgaaaagcagagatggrgcctctcagtgatcgagcatcccacaccacctaggaaacgttctcgccagaaagttaaatctaaatgtggtggaacctctacatctaactacaaaattrcaggaaacataggggttagaagtacatctttaacaacaccatgagggtgcaattagcaaaatctagattatgggaaattttacaggatgaaagtttcttcattaaaaattgcaagggtggctgggcacggaggctcacatctgtaatcccagcactttgggagaccgaagtatgtggatcacctgaggtcagttcgagaccaccctggccaacatggtgaaaccccatctctgctaaaaatacaaaagttagccaggcatagtggcatgtgcctgtaatcccagctacttgggagcctgaggcaggagaatcccttgaacctgggaggcagaggttgcagtgagccaagatcaggccactgcactttatcctgggtaacagagtgaatgagactccatctaaaaaaaaaaaaaaaattgcaagggccagccgggtgtggtggctcacgcctgtgacccgggcactttgggatgctgaggcaggtggcttgcttaagctcaggagttcaagaccagtctgggcaagatagcaaaaccccatctctacaaaaagtacaaaaattaaccaggcgtgatggtatacacctgtagtcccagctactcaggaggctgaggtgggaggatcgcttgaaaccagaaggtggaggtcgcagtgggctgaggtcgcaccactgcattccagcctgggtgacagagtgagaccgtgtatcaaaaaataaaaaattgtaaggaccaaaaataagggatgagaggaactgacagatgaaaaataacttgagaaaatatactgtgtctgttttatttgaatactgcctcaaccaaattgaaaaaaaaactagaaagtgaatttttgataataataacttaatttttaaagtgatctattttgcttcataaagcaattatattattttactatgtttagatattatgcaccatcaaataaaacaattagagatttctttggggcatattagaaaacatagttaactgtaaaagtatgaaaggacagctagcatgagagaggacctgaaaaggtaaagcaaaaggggacatgaaggtatgaggtcagagagagggcccagcccacggtagagaaatgtccagcaccaattctgttcaagtgtgatcaggtcaaagtgtgtgctagagcacaggggagttctgaaccaggattgcccccgacaggtcactcagctctatgtgccagcatccagacatgtgtggaggttccggcggatggggaggataggcccgctgcagtccaccctggacggtgagttctctaggacacagggttactgaggtatgaattacatgctgtcaaattcactcctttaatctacagatctgttatttttcataaacttatacagccatgtcactcccagcaggagctaccatgtagaaaagtttcatcacccacaaaattgcctctagctccattgcggccacctcttcagcagccacccatttctgttttgtcctgtcactttgccttttgcaaaaggcctccaaagggaaccatgctgtgtagtctgctcctggctccttttggtcagcacgctgcatttgagggtgctgtgtgggttgattgttccctctgttgctcagcagtattccagtgtggggatgcaccacagtttgtgaatccattcattggttgaaagacatttggttattttttctgtctctgggaatacgagtacagctgctataaacatctatgtacaggtttttctgtgaacatacattttgtttgacatggagtaagtttcactgggagtaagaatcctgagacatttggcaagtttatgtttaacttgatgagaagctgcagaactgtgttccagggtggctgcacggctttgcattcagaccagcaatgaatgagagcctctgttgttcccagtcctcatcagcacttacagttgtcatttaaaaaaaaaaaattctatgggccaggcgtggtggctcwcgcctgtaatccccagcactttaggaggccgaggtgggcggatcatcaggtcaggagttcaagaccagcctgaccaacatagtgaaaccccgtctctactaaaaatacaaaaaactagctgagcgtagtggcgggcacctgtaatctcagctacttgggaggctgaggcaggagaatcgcttgaacccaggaggtggaggttgcagtgaaccaagatcacaccactgcactccagcctgggtgacagtataagactgtctaaaaaaaaaaaatttggccattgtaaaaggtgggaaatggtatcttcttgtggttttaatttgtgtctaccagccgactaatgatattcagcatctttttcatgaatttgtttttttgttktgttttcttggttgttttttgtttttttggagacagggtctcactgtgtgctcaggctggagtgcagaggcgcaatcacggctcactgcagccttgacttcctgggcttcagcgatcttcctgccgtagcttccaaagtagttgtgaccacaggcgtgtgccaccacacctggccaattttttaatttttttgtagagatggaatctccatgtgttgcccaggctggcctttaactcctgggctcaagggatcttcccaccttggcctcccaaagtactacgattacaggtgtgagccactgcacactgcctgtgaacatgttttttagttattgaattttgagagttataaagctattctggatatagtttatcagatatgtgatttgcaaatattttgtcccaatctgtggcttgtctttttcttttcttagcagtgtctttcaaggaggagaagttttaaattttgatagaatcccatttaccatttttttctttaatgaaattgtgcttttgatatgatgtctaagataccttcacctaacactttactttttttttttctttctttcttttttgaggcagggtctcagtgtgtcaccaggctggagtgcaatggtgcaatcacagctcactgcagccttgaactctgcagtctcaggcagttctcccacctcagcctcctgagtagctgggactataggcgcgtgccaccatgcccagctaatttttaaaaaaattttcttcgtagaggcaaggtctctctgtgatgctcagtttctcaaactcctgagctcaagggatgctctcgcctcagcctgggattacaggcataagctgccatccccagctccttgaaatgagttttaagaggccaagttacgatttattgttggaaaggaatgggatatgtgtttattcatgaaatactgcctggggcctactgtgtatacagccttctcccaggcaccatctcatgcacacacgcctggtctgggaggaactttgttgccatagtaggagggaaagggcacgaaggtggtcgggggtggccagggcaccgcccactgctggatctggctgcattcgggcctcaccgccagtgctagggctagctgtgcacttgagacgtgctagacagctggagtggaagtgtagtccttgattaggacatctttaatattcgatcaagttatgtgttcggggagctactgtgctgatcctgcactgtgcatggctcatgggtctgcctgaggcggggatgtgttcatggaactggatttagataaatgagttaatcaggatgatttcaagaatcttcaccttaagaattgtcagtgggaatgcaggggaaagtacaagtgaactaattaaggttttaaaatgtgttttagtgggtttggagtccccrccgctgtctgtgtctgaggaaagacagcttgctgtcctgacagagttgccttttgtggttccatttgaggaacgagtaaaggtatgcaatttggcttctttattgtcactacgtatcatattagtgttaagaaattaacacacacccaccagagaaatctctaaaggtgcctagtgcctggctgattacataacatacttttctcattaggctgaaatagctaagaatgatttataaaacccaaccagatacctctttttacaaactgaaagtattttcttagttacaactgattgaaagccagtaacactatagatttcttataatgagggtctaacgtcatttttctctattaaattttgcattatttggccaggtacagtggctcatgcctgtaatcccagcactttgggaggccgaggcaggtggatcgagcccatgagtttaagaccagcctgggaaacatagtgaaaccctgtctctacaaagaatacaaaagttagttgggcgtggtggcatgtacctgtagtcccagctacttgggatgctgaggtaggaggatcatttgagcctaggaggcagaggttgcagtgagccaagatcgtgccagtacactccagcctgggcaacaaagccagaacctatctcaaaggggggaagaaactttgcattgtttttgaaaaagcaaattttttgtgaagatatgcttctgtacattcacgtttatttatcagaaacgatgtttttttttttctgagacaggatctcactctgtcacctgggctagaaagcagtgctgtgatcatagctcacagcagcctcaaactcctgggcgcaagccaccatctcaccttgacctgctaaagtgctgggattacaggcatcagccactacacctggcctggaaacactactttattttttttgttttttattttttttgagatggagtgtcctctgtcgcccaggctggagtgcagaggcgcgatcttggctcactgcaacctccgcctcccggattcaagcgattctcctgcttcagcctcccaagtagctaggactacaggcacgtgccaccatgcctggctaattttttgtattttcagtagagacggggtttcgccgtgttagccaggatggtctcgatctcctgacctcgtgatctgcctgccccagcctcccaaagtgctgaaattacaggcatgagccaccgcgcccagccactttactttttataaaaaaagaaatggacaaatatcttaattccttgtctggtgtctttgatgtacwaaactttgtttatatatgtttccaaattttaaaatgttttgtttttatttgtcaactatttttaccaaatttctaaagattacttggttccgttcttcagtaatggcttcaagagtgtattttttaggcctatacactctatttgcatggtgaacaaaagagtttcttttgaagctgttcatgtccctttactaaaccctccctgcacgtgcgtacacacacacacacacwctctctctctctctctctctcccactcactcactcactcactcacataattcctgagctccctctactggatttttaacatcaaaaaattatttgaattttgtcagagatatttctactagtgttagtatacagctttttacaaagctgttctttcctcactacctaagtttttataaaggatttataaatgaaaatattctatcgcaaggggtttaaattttaattttattttatttttgagacagagattcactctgtcacccaggcctgagtgcagtggcgcctgcaacctctgcctcccgggttcacaagattctcgtgcctcagcctcccaagtagctgggattacaggcatgagccaatgtgcctggccggatttttaaaatttattttaaactgggcaaaggagcagctttagaaatayttaaatatgatatacattatatattatctatacatttattgataaaaatcaagatttgataccttgactrttagcatttatttcagaatttatgaagatacaaaagataagatttagcagtttattctttggtaggttgtaagaggtcttttgtttctaataaccttacagctttccttgtttgttagatctttcagaggttgatttatgcagataagcaagaagttcaaggagatggtccatttctggatggaattaatgtcacaataagaagaaattacatttatgaagatgcttatgacaaactttctccagaaaatggtatatataattctttctgtgtaktatttggcaggtggaggctagggaattgttttagaaaatggtggttctttaaaaattagtgtccatcatcttgttccataatgacttaaaaactgaaatgtgaggctgggcatggcagctcacacctataatcccagcactttgggaggctgaggtgagaggattgcttgtgctcaggagttagaggccagcctgggcaacatactgagaccctgcctcaacaacaaaaaaagtgagcttatctggatgtgttagcgtgcccctgttgtccctgctctgcaaaaggctgaggcgggaggatggcttgagcctgggaagtgaaggctgcagtcgaactctgattgtgctactgctcaggccttggcagtagagccagacccagtctccaaaaaaaagtgtagcaagtcagatttgggagacatgttatcaagtaatatttctaaaattgacagttactacaacagaagcctttaaaaaatattaattatttttaaagggcaagaaagtaaccagttccccacctcctgttgtctgcccctaaaatttagtttgcaagctgttgttctaaaaatctcgatggtagccatttatattctgcgtttttgtataaatatttatatgaaatcacaaattgtaagccaaattaaacatattaaaataagtgccattgcaatccaagtttcttatgaaaagataagtgtgctccaatgacactgccgttagtaaaggagaattatactgtgatagcatttggagctcactggcacgtttcgtcgtatgttcatatttgatactcagtcttgaaagttcgtgtgctattaacctctaatatattagcagttttaacttccaaatattgtgcttatggtaatacattaattccatgttggtcartgccgaggggattaaaatgaaagtttaggctggatctaaaattaaaaatgaaatcatcttacccagcttttggaaggtgatgagttgtccaatgtgaaatgacaattgccttttcctctaggggagcaacttaattttcttctaaggaaatgaaacctgatttctaataatttttattgcttacataaagaactaattttatcataatgttggaacagtggaggaaagctgacatcagttgtttccttactctatttcaagctttttttttttttttacacaatttaccgttgccattgaatccttgccatggccctctgatgccgagtgtcatcagctgagaccgagtaaacttaggtctgcatgcaggctgtggcctctccrcagggccrggtttgtcttgcctagcagattgtgttttcagagtatttggtgtgaatgagatgagactaggtactttgactcctaatctaactaatcgtctaattgagagatgttttggggtcccacagtaccttataaatcaattctaatagttcttacattgtatttttattagcagatttcacgttcatctctcccacttgaccctggaggtctttacagcttgggatggaattgtttatttggtgtacacagctgatgctcagtagatgcttattcaatttgtgattgaatcccaggggaaaaaaatagatgtgacaaaacaatgagtttgccaatgatcgtgtagtgtttagagaagagtgagatgtttaaccttgaagggccttccaagaggcagttctggagcagcacctgtaggggaggagctgagtttgtgggtgaggggagctccgagggcacgggtgctgtggtcaggggtacttgcaagtgggggggctgtaagctcttcagccagagtagaatgcgtttcttacttaccagcaatttaaaattaactttaaaactactccctgggcgtggcgcagtggctcacgcctgtaatcccagcactttgggaggcygaggcaggcagatcacaaggtcaggagatcgagaccagcctggccagcatggtgcaaccctgtctctactaaaaatacaaaaaaaaatagctgggcgtggtggtaggcacctgtagtcccacctactcaggaggctgaggcaggagaatggcatgaacccgggaggcggaggttgcagtgagccgagatcgcaccactgcactccagcctggcaacagagtgagacttcatctcagaaaaaaaaaagaaaaaactactccctgtagatgattttttgatgttactgtccaattataacaagcctcaaatttcctaatgaatccttaagctttaaaaattgttaaaaaactgatcacacccacctccctaggggcatgctaataattgcattsaagttaaaagatttggaagaatcttctcatattgtttatactgtaatgcttgaaatctttataaatgttctcaactcaaatactgtaagmatgattaagccatgtgttaaaatgtggtgttttgctacgcaaattagtaaagtcagatatcatctcagaataattaatttacttgtgagagaatggtttgaggtgcatttttgactaaaaatttacatataatcaactaatgtgattattccacgtgtcatctagtcattgaagtgaatccatgctttacgatgctcgttgtcttatctccgaacgattctctgcagtgtgcatgttagcccctgttacccataagttgactgagtggaatgcagagattgatggctgttcctgcagttggtgctcagagagcaaagatgggctggggttccacagggatgcccacgcactcccagcctgcactgcactaccttgttgcagtgtggaatattgggagaaaccgtcacattccctcatgggattgckgtaagaattgtaaagtgggtaacaaagttccctcggggcctggagctcactctgtcattgactcttgggtgagagtgaggcacagctggctctgcactctgctgtcatcagttctggagagcctcacttgtctgcttttgttggttggttacttttattttatttcatttaatgggcagaattaccatttcttcctgaagcagaggaaatttattccagaagcaggaaagcaagctggagccaaatggcttagatgtgtttacctgattcccaagggtgacacggacactgacccagaggtggcgggcacggcagggcagcactgcatccctgctgctgtgcagagtgrccccatcttgtccattcagtcagcgaccactgctcagtgaatgggaacttggtatttctgtgtggtggctgtaagcctcagtcagtccagtaaattgtatttgccctatttgacacatatcatagactatttacactccaggtacggtaacttcaaaattactgacacgtgtacatagcaatctagggatagacagggttttgaggagattgcatggaggctctatcaaacattctgctaaaccccttttccagaatgcttctagaggttacatgtcccttgagatgctccagggcagatatgtttgggtgactatgcaccaaagccaacagagggcagcagcgcatggggcctgtgaaagtgtcgaatgtacactacgtgcggttgctttcccctgacttcatgcagcagcctgtccccaactctcgtcccctctccttccccctatcttttctgcaaagcacctgtagaacattcttagggaaagataaaggacatttcacttacttccccaaagctgttctctgattcakcctgtttatcagagcacatcttaacttggtccaccttgtgttttttttggttttggrtttttgtttgtttgttttttgaaatggaacttctctcttgttgcccaggctggagtgcaatggcacaatcttgactcactgcaacctccacctcctgggttcaagcgattctcctgcctcagcctcctgagtagctgggattacaggcatgcaccaccacgcccggctaatttttttttgtatttagtagagacggggtttcaccatgttagtcaggctggtctcaaactcctgccctcaggtgacccacctgccttggcctcccaaagtgctgggattacaggcatgtgccactgcacccggcctgtttttggggtttttaaatttttattttagagatgggggtctcactttcagccaggctggagtgcagtggtgcaatcatagctcactgcagcctcaaactcctgggctcaagtgatcctcttgagtagctggaattacaggcacataccaccatgcccagctttwcttatattttgtagagacagggtcttgctagtgttgcccaggctggtcttggactcctggcctcaggcagtccttctgccttggcttcccaaagtgctgggattacagaagtgagcctctgtgcaatgttttaatttatttatttattttwttttttgagactgtcacgcaggttgggatgcagtggcacgatcttggcttactgcaacctctgtctcccagattcaagtgattctccggcctcagccacccaagtagctgggattacagacatgtgccaccttgcctggctagtttttatatttttagtagggatggggtttcaccatgttggccaggctggtctcgaactcctgacctcaaggcgatccgcccacctcagcgtcccaaagtgctgggattacagacatgagccactgcacctggccttaatttactcttcgtagcaaattatataaccagtaattttccccccttttcagccaaatacagcttttaaaagatcacgtagatcagggttgtccaatcctttggcttccctgaaccacattggaagaggaataattgtcttgggccacagacaaaatacactaacagtagctgataagcttttgaaaaaaaaaaaaaattacaggccgggcacggtggctcacgcctgtaatcccagcactttgggaagccaaggcgggcagatcacaaggtcaggagttcgagaccagcctggccaatatggtgaaaccccatctctactaaaaatagaaaaattagccaggyrtggtggcacacgcctgtagtcttagctacttgggaggctgaggcagaagaatcacttgaacccgggaggcggaggttgcagtgagctgagatggcaccactgcactccagcctggatgacagaggcagaccccgtctcaaaaaaaaaaaaaaaaaraaacctcctaatgttttaagaatttaggtatctgtattgggccgcattcaaagccatcccgagccacatcggcctgtgggctgcaggttgaggacaagcttgctgtagattctggaggaccaattccctgagagtttgtgggggcggaggttgcagtgagccgagatcgtgccactgcactccagcctgggtgacggagcaagactctgtctcaaaaaataatgataatatcattgctgttttgagtcctatgttaaaatgtccctaagatcctcacaccccttccttaagccttcctgtaaggctagttgatgtyattgcttgcttgtaacatctttcctcctcaccctcccatttttttttaacagagcctgatttgaaaaagcggatccgtgtgcacttgctcaatgcccatggcctggatgaagctggcattgatggtggtggtattttcagagagtttttaaatgaactactgaagtcaggatttaaccccaaccaggggttctttaagactactaatgaagggcttctgtaccccaacccggctgctcagatgcttgtgggagattcttttgccagacattactacttcctaggcagaatgcttggaaaggtaaagtaaccttcatrtaaaaatagacctcggaccaaaagatgttgacattttatgtttatgtgtggttgttatccaggtttaccataaaatactgtttgttttaaatttggatgctaaatgttgcaaaagcactgcacgaaacaaatttgtatggttgtaagtaggtgctatggtttgaatgtcccctccaaactcatgttgaaacttgatccccagtgtgccagtattcagaggtggaatctttaagaggtgattagatcatgtgagctcggccgtcatgaatggatgagtggtttattgtgggaagggccctggtgactttttacaggagggagcccctagctttgtgatgccctgtgccgcctccggactctgcagagtccccaccaatgagaagacctcascaggggctgcctctggaccatgggctcctggccttccagctataagaaatggatttcagtttttattaattactcagtttcrggtcttctgttataagcagtcaaaacggactaagacagtaagttactgcctagtgactattagtttaataggactgccgcaacaaattaccacactctttgggggggagggaggcttagaaaaactgaaatttattatttgacagttctggaggctggaagtccaaactcagggtgtcagcagcagcatagattcctttttagaggctctagaagaatccattcttctggttttgccagtagcccttgaccttttttggcttgtagattcatcattttgatctctgcctctgtggacttctccctgagtgtctctgtccaacattgccttattttttttaataaggacacctgtcattgtattggggtcttccctgatccagtgtaacttcatcttaatttggttatctgcaaatacctcatttccaaagaaggttatattcacagattaggatttgaatttgtcttttggggggacacagctctacctgttagggtgacatttataaagttgagtattcaggaattgttattagtttgtttgtttgtttgtttgagacggagtctctccttgctctgttgcccaggctggagtgctgtggcgccatctctgctcactgcaaactccacctctcaggttcaagggattgtcctgcatcagcctcctgaacaacaggtgtgcaccaccacgcccagctaatttttctatttttagaagagatgggggtttccaccatgttgtccagaatggtctttaactcctgacctcaagtggtccacctgccttgtcctaccaaagtgctgggattacaagcgtgagccactgcacctggcctgttattcgcattcttaaataaattagaaattaatgttgctattgtgattaatttctgtaagaatcagagctataatcattttcaactttgtaataaaatttctttgtctcattggtggttctgttttccgagaagcatagtgcatggagtcgcctgttttgagaagcagcttaattgaaaaatcagtgcctgcaaaacaggtggtgcttttaggacttcttttacataacagttttattaaaatataactcacattatggaaaattgaaccttttaaagtgtacagttcagtggtttttaatatattcactgtgttatgtgaccatcaccaatatcaaacttggaagcaatgtcatcatcccaaaaaggaaacgctaggtagtcactccctatcctgcccttcctcccccagccctggccaaccactagtctactttcagtctgtatggatttttttttttctagacatttcatataagtggaatcatttgttatatcaactataaatttgtgaccttttgtgattggcttctttgatttagcatgttttcaggtttcattcatgtcgtagtatgtcagagcttcactcatttgaagggccaaatcttatttcattgtatggatataccacactttggggtttgtttttttcattttgaaacaggtctttctctgccacctaggctggagtgcactgctacaaacrcggctcagtcctgcgcttaaggaggcctcctgctttcagcctcccgagtagctgggaccaccgttgcttgctaccacacctggctaattatttcattttatcgtagaggcagggtcttgccatgttgcccaggctggtcttgaactcctggcgtcaagcaatcctcctgcctcaacctctcaaaaggctagaattacaggtgtgagccaccacacccagtcaccgcattttgtttacttactcatcccaggctggagtgcagtggtgcatttgcattgggaatttgcattgtttccaccttttagctattgtgaataatgttactgcaaacatttgtatacaagctgttatttggacataggttttttgtttttcttgggcatatacctagacatggaagtgttaggtcatacagtactccacgtcaaagtgtctgcaaccttttacaatcccaccaacaatttgtgaaggtttcagtgactccacatcgttgtcagcacttacttagtgttgtctttttcattacagccattctagtgggtgggaattggtatctcattgtggttttaatttccctggtractaataatgttgaccrtcttttcatgtgcttcatgacttctgttgagaaatgtctattcaagtccattgcctatttttttattggattgtcttttattattaagtccctgcaatgcaatgaattatgaaatttatattctctgaggaagctgaaacattgtcagataaatgatttgcaagtattttyttctctggattgtctcttcactttcatgatgatttcctttgaagaacgaacatttttaattttgaagtctaacgtgtttttttcttttattgcttgtttttgatgtcttatccattccctgacctaaaatcacaaagatttacacctgtatgttcttctgacggtgttgtagttttagctcttacattttggtctttgatcctttttgagttaatttttgtagattgtatgagttaggcatcctcatattcttggcacccttgttgaaaattagttgaccgtacacgtaacactctgggtctgccyttatgcartatggtcttgattactgtagctttgcagtatggggtgtgtggatttattaatagcagatgggagtagaaccgcagccttgttaagcagggataatgggaaggaatcagtctatcctggatatagaataattcccctttatttgtgtctctttgaaatgcattgtcgtagccccagttatttctttgttcagactcccagtgattttaagtgctcttcaggtttgagaaaggrctccaacctgacttcactaccgtaacggtatgtgttatatcatcatcttcaggctcaccgtatttcaggtrgcagatttcaggtgttgatttgatgttgatttgtgagttggctttggtggcagttttcagatagcatctctctctttgttgatggtcacacagcctacttctcagtttcagcttcccctggaggatgtacatttcataattcattgtatgaaaatctttacaatgggccaggcatggtggatcacacctgtaatcccagcactttgggaggcctaggcaggcggatcacytgaggtcgggagctcgagaccagcctgaccaacatggagaaaccccgtctctactaaaaatacaaaattagctgggcgtggtggygcatgcctttaatcccagctactccagaggctgaggcaggataatsgcttgaacctggaggcggaggttgtggtgagccaaggccttaccattgcactccagcctggcaacaagagcaaaactctgtctcaaattaaaaaaaagaaaagaaaagaaaatctttacaatgaaatcccttagttctttctgttaaagtgagcccaagaaccttctaacttaatatatatgtgaaaataaaggtgagtgttctgctagactaacctgaaatactctaaacttggtggtttttacacagtacagtcacagaagatagagcaataattttacctgcatgaattaaatcttaagattatatattactttttcttcctgaatgtataaatcatccagtcttgattaatgtagaagctaatagttatgtaagtctggtgaggataaactcatttctcctctgtttattgacatattgcttataattgaaattattctgaagatgatgtcattgtacagttctgtactttggaatatgtatatatttacagaagatccagggaagagaatttgtgattttaaacctttctcccacaaatgaagtttatgtaagttatatcttattaaggctgtttaaaataataaagtttagaccaataacaaaactaagagtaatttgaggatggtagttaacttagtttcacatatttaagacttcccttacattactctctgtgtggaaattcctaaggggttactaacttccaaaacatatctgatgaccatctgattacagagttaaactttgtgctaatgtgctaaccattgctcggatctaagtaagtgtcatagtacagcagctgatagtgtggcacctgaacattacatcttcaagagaagaaaactgtatattgattgattgtgatatttattgggtcataatgtatttaaattttctttaatgcatatgttagtgattgtttactgtgataaagtgcaaagaggtcttcaagagtgatcctgcagaggaagaattacctcatgtcactggtcacttctcaattaaaagttccattagcaaatgattcttgcttctggtgtgggtcatgattgcattttrtcgcctgtaartcaggctgcagacagggaataaataaacagcccaaggatgtggtaatgtcatcttgaacttttttttacagatagaagcacctaggtccatttaagccaattaagttcagaatatttattgaggttaatcctttatcatatttgaattctatttgaaaatggctttttttcttgctttaggatattgatttaattgggatggcatgcctataaatcagattatttgatatgatcttggttrtatatttgaaaatttcaattagattgtataactttggcgtggtttataattttttatcgyggtagaattcagtgtgcatttaatgtattctgtagtgtaatattggcacttaacagtttatcttgagattttcaaaagttggaaagtttctttttctccatcattagcatccttttgtaaaatgctcactgaatttgctgaggctttaaacatctaaattgaggtgaatactagtcattttggttgccttagtccttaaaggggcagagcttctcttgtataataccttgttttgaaccctaaactcttttttttttctcttttyttgagatggagtctcactctgttgcccaggctggagtgcagtggtgcgatcttggctcactgcaacctccacctcccgggttcaagcgattctcctgcctcagcctcccgagtagctgggattacaggtatccaccaccatgcccggctaatttttgtatttttagtagagacggggtttcatcatgttggccaagctggtctcgaaatcctgacctcaggtgatctgcccatctcagccttccaaagtgctgrcattacaggcgtgagccagcrcacccggcaagacagttttctatgtaagtttatttcttcagaattaaccatgaaatacaagtggtttmgattctacagttaaaatgggagatgtattcctgaattcagttgattgctgcacctaaataagatttctcggctgggtgcagtggctcatgcctgtaatcccaacactttgggaggccgaggtgggcagatcaccaggtcaggagatcgagaccatcctggctaacacggtgaaaccccatctctactaaaaatacaaaaaattagccgggcgtggtggcgggcgcctgtagtcccagctactcaggaggctgaggcaggagaatggcgtgaacccgggaggcggagcttgcagtgagccgagattgcgccactgcactccagcctgggcgacagagcgagactccgtctcaaaaaaaaagaaaagatttctcactgtaggtttagcaccacaaggtaaattctttctgcccttggattaagtaggtcttgcttactattgagttattccttcctttttatttttctcatcacgcccaagcaatagttaaacatctgaaattcatgagaagaatggatcagtatggtattgagaccattctgttttttctgggccatgttaatttgtcaccatgaagattagaagcacacactcttgctggccccacttaaagtctgctgtttatctttggctcttatttgtgcaataaagacaacaaataatctaaaaaatagtgttgggtgcagtagctcatacctgtagtcccagcactttgggaggccgaggtgggaagaacacttaagcccaggagttcaagaccatcctaggcatacatagggagacctggtctctaccactaaaaaaaaaaaaaaagtagccaggcatggtggtgtgtgtctgtagtcccagctacttgggaggctgaggtgggaggattgcttgagcctgaaatgtagaggctgcagtgagcmgtgatggcaccaccacactccagcctgggtgacagagaccctgtctcaaaataataataaaatagggcccatgtaaatccttttaaacatttaaatattcaatttaatttagatttagatttagcaaatgtaactttatgaaataaaagccaaatgaaggtatrtggtgttaattttattgtttctaaacttaaaatcagctttgagaggcggcagtaagtaragtggtggaggtcacgctctggagtaagacaggccagtggggactcctggcgtcaccarcagagggcagcagaatccggcctgtgttgtcgtgggcctccttggctttggtgtaagtagctagcattggtcaagcactcaagctgggagaccggatggagtgtcacatcgttcaggtggagtgatgctgctgcccatgtcccggtggtagtgctggtaagaagtcatcatattcaaggagatttgctgatgaatgagatgttgggatgtgtgaggacaggagaaggtaagggaaccacctgggttctgttatgagaactagaaggatggaggtcatgctgactaagctgggraaggtgcgggcaggagcaggtgtggagagggaggcattcttatggaggcttagtgaggggcagttgaggataggggcctcaagttagaggcagtatctgggctgagccatcagcattcccagggtccttaaggtcatkagcctgaattagatcacccagggtgtaggtgtcactggagaagagaagagatgaagaactgagccccagggctctccaaggtttagagtccagagagtagagaattgactaatagaagttcaggagatgaagctggaaaggaagggagaaaaccagagaagtgggatttcaggtgccaaataaagacagtgtttgaaaggaagagaaaggtgggtattgtgtgatggtactgttagaccaagtaaggtttagcactgagaagtggccatgtcatttagcactctggacaagtgatttctgtggcgtggtgaaggcaaaaacctcagcagatgggctgaaaagaatgtcaggattatcttcctaaagcatcatattaaagctgaaaatatccacatcatatcacaagagaaatgtgtacctattmattagaatacatgtgaaagaatgtttatggtaacactgtatagcccctaaactggaaactacaaaaatgtccttcgaaagcataatgataataaataaattgtaggatattcacaagacttactgaatgaacagactacagctactcaaaatggtatgagtgaacggcacagacctaacattgagttgaagaatccagacacacaaaagtacattttgtcagatttcatttatggaagttcagaaacaagcaaagctccttgcagtttttggaaggcaggatcctgatgctcctgggagggtaacactggaagggggtgcagggggcttccaaggtgctaggcattttctgcgctgtggactaagtgcttttccataagtgtgttcactgggtaaaaatggatggaaccacaggsttgtgattagggcactctgcagcagtagacttcagagcagttacaagaggaaggatcggagaagaattgggggactggttatcaagaaaacttgagcagccgcttaagggatatggggctaggaaagctgtgttctaaagatgggagaaataacagcatgtgtatttgctgctggaaataagtcagtggaattgctgagggagagaggaaccacaccctgcaaagtgagggtgtggggtctggtgctgaagcagggggcgccacaggctgcgtgtccaagaagaggtagaggaacactgggtgcagctgcatgagctggggagcaggagctcattctgactgcatcccactgttgctgctttctgggtgatgcagcagagagcaaggatgggaagagcagtgttcccagaccagccacatctgcatcaccgggggatctattaraaatgcaaattcttgggctccaccccagaccttctgaatctggaactctagggctagggctcagcaagctgtgtgttttggtttttggttttttggggttttttgagacagagtcttgctcttggcatggctcactgcaacctctgcctcctggttcaagcaattctcgtgcctcagcctcccaagtaactgggactacggacacccaccaccacgcccggctaatttttgtgktttttgtagagatggggtttcgccatgttggccaggctggtctcgaattcctggcctcaagtgatccgcccacctcagcctcccaaagtgctgggattatgggtgtgagccatagcacccggccagcaagctgtgaataggcttcaattaataagtgtgactctgatgcatgctgaaatttgagaattactggacaatggaaatacaataggattgccagttagtgtagggcccacttgacgttaatatcataaagtgaagtgagaccagccgtgtgggttactttttctacacccgtaaacggctgtgtgggtctgactaggatgtagagtcagatttaaccaggggtggggttttttgccaagtgactataataaagggtgaattggttgcaagttcagagtggttacaagagcctgcctttgaatctaggctgtttagagaggaaattaatccgtgaatggagatttgagggcaagggaagctggacaggagaggagacctgtggagtcgaggtccttcagggagtcagtgtagcggtggttagagctaagatcagaggggcttagttaccggtaatgccacttggaggacagagctgaaggaactggtagctaaggtggagttgagggacagccaggatggtagaatgacagtcaactgtgtgctacagatgtcaccaaaaattatcaccagagtgtgttggactctcaggagctaaaatcttgaattaaggggcagtgactgaacccgggagaggtaatggatgcgcaagcccagtgcatgagattgaaagccagggattttagcgggagggaagggaaggatggtctggaagtggcagtaaggagcacagggggcctacctcccttctgtgcccggtggttcaagggtgcaaaagagaccacagctactcacgcagagtgctctgaggatcacagagcgctgcagggcatgtgggaaaatggactgctgagtgtcgcagcatagtcaggaaaaaatcccgtcttagctgtgagaccaggagcacaaaaaacaaaaggaaaaatgaactggacttaaaaatgtttatgcttcaaaagacaccatcaagaaactgaaaatacaacacactgaaagagaagatacttgtggcatatatatgaaggactccatgataaaaatgggcgaaggatccaattggacatctctccagggactggcagcaagcaaatgggccattggttcgtgcaaagatggccagcatcactagtcatcaaggaagggcaaagcatagccacaggctgccgcgcacacccgcgagtacggcgggaatcaaaccaggaaccgcagggttggtgaggatgtggaggaatcagtcctcatgcattgccaatgggaagataaaatggtgcagccactttggaaaagtttagcagttcctcaaaaggttaattacctttggacccagcaaacatatttacccaaaaacttgcacacaaattctcacaacagcattattcctaatagctaaaagatggaaatgactcaaaggcccatcagctgacaaacgggtaaacagaatacggttcatccatacagtggactattactgggccgtaaaaaggggtaaagcactgacacatggcacacatggatgtgccttgagaatgttctgcccggtgagagcagatgcagagatcaccaaagacatggttccatttatatgaaatgtccaaaacaggaaaatctagagacagaaggtgggtgagtgatcgccagggctgggaggaaccaggagtggcagctgagggatgtggagtttctttttagaataatgaaaatcttcagaaattgattgtggcgatggtcatacaactttacgaatataataaaacctttgaatgtaagttatgtgggtgatatcccagtaaagctgttacaaaggaatcgtgcggtaggtaacgtggtgactgagagagccagtgtcacagaagttagagaaagcagcagtcagtatcaatcggagttcatggatgctttcgttctaaagctggaaggagtatagtgattagagcatgagctgttgttagggaaacatagtacctgatggtaacgaaatctgttatcatcgaaggcatcattgtcctcaaatttctcaagaggtggctcgacagatttctagtctgatattttattctcctatatggcaaaagtagaattttgaaacttgaaagatgttttcttctaattgttgaaaatagttcttggttatgtggggtaccttgagactgagcctgagttkttttttttttttttttttttttttaaattcctactgtctttcagaagcaggagtgtaaaactgtcctcagatgctcagatgtttgcttcttgtcagtggaagtgggaatatgggtttgctactttagcgaacttccttgttcatgaagatgttttttatcttctagaaatattttggtgagcagggtcaggggtttctgtgttttggagcctgaacctggaagccatagaactagaagtcgaggaaaaaaaggaaggrtcgagccaggtctggtggctcaagcctgtaatcccagcactttgggaggccaaggcsggagaatcacgaggtcaggagttctagaccagcctgaccaacatggtgaaaccccgtctctactcaaaatacaaaaataagctgggcgtggtggtggttgcctctaattccagctacttgggaggctgaggtaggaaaatcgcttgaaaccrgaaggcagagattatggtgagccaagattgtgccactgctctccagcctgggtgaaagagggaaactccatctcaaaaaaaaaaggaagcgtcaactccaagctgctcaaaatgtatcatattgtggctcgatcgctggaagccactatgagraaaataggacaggagatgtgcacgtgtcctccacggtccccatcccccatcctctgtgccctgcagggcttccgaagtgaaagccgagttggagatgagaagggcaatctstgcaggctttccttgtctttatggagtgccagggtctcaaggaagaaaaggtacgagcactgtgaggcctcggcagctctgcatgctggggatttgggcagcctctgtagagaagtaagagtgcagcacccgtgtcctggtgtggtggttcaggatttgcaaggcagagttgctctttttctctgagtaacagctagtgggctctgctcagttatccgtggtagacatctgctgaatgaggagtgagttcacctcagctcaygtttagagattggctttagggcacctgccagtggagtattagagtgaggcccacggcctggcccctcccagggagcttggtgtcctcctgctgctgttcctgcatgtgaggcgcaggggacactgggacaacacggattttttagtgccagggtagctgtgtagaccaagtgttgcgggagttgatggtgtagaaagctctctggaataggattgtgaagatctaggacttgaaatgggtgttgacgtatacataacctgaaacccacaatccgaaaactcttaacacaagaatgaaagggtttttttgcaaacagattcatgaatgcagaattccagtatrtaatgtggtccctgacatatagttggcacttaataaatgtttgttacatgaatgggcaccatatgttgtatttggactcttgcattaaagatgaggtatgttgccaggcgcggtggctcacacctgtaatcccagcactttgggaggccgaggcgggtgatcacctgaggtcaggagttcaagacaatcctggccaacgtggggaaaccctgtctctactaaaaatacaaaaatttgctgggcatggtatgcgcacttgtaatcccagctgctcgcgaggctgaggcaggagaatcgcttgaacccaggaggcggaggttgcagtgagctgagatcgtgccattcattgcgctccagcctgggcgatagagtgaaactccgtctcgaaaaaaaagaaagaaagatgaggtatatctcctgccccctaggagtttagagttagttacacaagcccctagtggtcccagtgactgaagggactttgtttttcaattccaacttactaattctgaagcacaattattaaatagcgtgttgctattagtatacattcttattttatgtttcttttttgttttttaaattatatggttaatatgatatgaaataattaaaattatctgcttgctcagttaggatggctttaaagcaagacatcatctcttatatagtttttagattaagttataaatgttcactttagagctgcctgaagattgatagagatgcatttgaaaagcattatttttttattgattcttaatgtagtaaattactgaagttatttggcggcaaacagaaatggtctgtgatgtggttcacatttattctgatagagccacaatttgcattaattgcgtcgcgactgcactcacttatattaaaaggcttctactataattaatcctttttatttcaaatcattttggcacaatttctagctataaacattcataaaagacagacagttgaaaaattcgttacaggtcttttccatatacctattgctatttttttcatgacaagtagttattgatatgcttctaggaacaagcgtggtacagctggctgagaaggccagtgtgaaaaatgctaagtggattattttgcataaaaaataggcagtttttgaagttgtataattaacctgtgtttagaaaataccttgatttatgcttacatttgtatctcagttgcatacattatggaaatttaatttataatccatttagctgatgcaatcatagtttttagtgccatcatttattagtgcttgtatattaaatgctctgaaggtttaaacctgcctcatgtaaaaaatggtacctatgcatttacattttatgagtcacagtgggatttctgtttaaaattcaggtagttctgatatatttaactagtttcactggtttattgttactaatgcagaaatggcaaacagtgaccttatatattgaacatcaaatgatttacacttccagtttacttttaaagtccactgtacaaatgagggcttttcttcagcacctggaatcaatcatgtagttgtatgcagaatgttccccttggctttgaactcgtcattcatttcgaagtgatgccgtttatcagtgctccaggttaatagtattaaccatccttaactttaaacaaactgtgacttttcaacacaactttctttacattatcaggagatgatgactatgtgcctgttgccattttattcattctctcattaagaaacccttttttgctatcttttcaaaattaattgggtaatcattagtcctcaaatcagaaataaaagcacaaggacataatacttyggtttacctggcagaggccagccgcagtcttcctggaggggatgttatgccggctctagttatcagacatgtgcctgagctacttaaaaaacagcattcttcagtcaggagttcgagaccagcctggccaatatggtgaaactccatctctactaaaaatacaaaaattagctgggcmtggtggtgcacrcctgtagtcccagctactcaggaaactgagacaggagaatcgcttgaactcgggaggcggaggytgcagtgagcygagatcgtgccactgcacactccagccygggcaacagagggagactccgtctcmaaaaaaaaaaaaaaaaaaaaaaacagtgttcttcacaatgtctgtcattttctgaaacaaaaagccagtggtactctagatgtttgcttttgggaaaacctcaacagctattttctcrttttctccagtcgtatcagtggacgagtccttaaaatgtgaatctcaaggggtgtctgagcatgccctgttggagtgtataagttctggaatacttatttaaggatgcgcattttatagactacacatacgaagtagattattactaaatacggtaactggttggaagctgtgactaagcaaaggactcactccccacaggagcagtggctcacagttgaaacgtttctcctttgctggaagcttgcagaagcacagtcccggctctctggaagctacttactcccatgttattaattcacacagatcgctctaatatttacagtgcatgatatggttgggtgatggcctctaggttggaagggtgacttctgagttgactgtctcatggatgaatgactaccccataaagttttgttttgattttggtattccctgggtagcaccatagcacttgaatcttaaaacagtaggataaagagggtctgggtctatcacagcatctcctgcagcacagctcatagtagtcatttgcaaggtatggttagtccagccttcaccttccctctctctgtccttcctgccgtccctcattctcgggcaaaaattccagtgctgcacctccagacagtaggaaggcccgtgactgcctctgttgagagggtttctttctctaaaaytgttctccacctgttctccacacccccgggggtaattagactacctctgtttgacctgggaaaataggatcactgtaaatacacatctctctgaagactggatrttttctctttttttgagayggagtttttgctcttgttgcccagactggagtgcagtggcacaatctcggctcactgcaacctccacctcccgggttcaagcgattctcctgcctcagcctcccaagtagctgggattataggcatatgccaccacacgtagctaatttttttttatttagtagagacggggtttcaccatgtcggttggtctggaactcctgacctcaggtgatccagccgcctcagcctcccaaagtgctgggattacaggcgtgagccaccgcacctggcctgactagatatattctaacacgaatggcttttgtagaggaaattgagatttcttgtttacttccattcctttaccttaagttaaaaaattgtccagatggaccacatggaaacaagataattaatgtctaactgcatgtctagcacagtgcctggcacctagtacctagtaagtgctcaaggaatggtaactgttgtctctattgtctttattagaaaacttttggccgggcaggatggctcacacctataatcccagcactctgggaggccgaagtgggtggatcacctgagctcaggagtttgagaaaagcctggccaatatggcaaaaccccgtctctactaaatatacaaaaattagctgggcatggtggtggatgcctgtaatcccagctactggggaggctgaggcaggagaatcgcttgaacctgggaggcggaggttgcagtgagctgagatcgcrcggctgcactccagcctgggcaacagagcaagactccgtctccaaaaaaaaaaagagcataagtaatatttcttgacatgtgaaaatcacatgaaacccaaatttggaacatagccaccctcactcattgacacattgtccatggctgcttttgtgctgcagggcagagtggcatatgcggttatgaactgggaccccccaaaactgtgctcaaatcctaataccccatcctgtgggcayggccttgtttggaaatagggtcyaatagctgcgaggccttgtttggaaatagggtccartagctgcgaggcgtgagttcatgtggttttcagtctcgcagtgtgtgatcatttgccgtagccaccttgggagactaacaaacctgcagttcctgaaggattcaccatccttctgttgaggaggagcatttgttggcttctgtctcacaagaaggatctgtctcttcataattccacgatttcgctcctaggtggtctgttccagagttctctgcatgcttagtgcgtgcattgaatgcctgcacgggatcctggagcacagtacctgcccactgaatatcagcttccatcttcggtactatgaggagaaaatacctgctctcttaggattgggtttaatatcaagttgagcatatggctctttgtttgtagaaggcttgtatattcgatgctaacgttgtcactgttctcttttgaaggctctctatgagaacatgctggtggagctgccctttgcaggcttctttctttccaagttgcttggaaccagtgccgacgtggacattcaccacctcgcctccctagaccctgaggtgtataagaatttgctctttctgaagagctacgaagacgatgtggaggagcttgggctgaacttcactgtggtgaacaatgacctgggagaggcgcaggtgaggggtcaggaggaggattcacatacctgtatagcaagtagcagcatctccttgtgtgtggaagtccatttgtgttacagcgtttgacttccgcacattttagttagaatgactgtggctgtgagttagacgtcgaagcatatagctccaaagcaccttagccctggcgtctgagctgagtgcagttcctgctcccacgcatgaagcctgttcctgcccggcagcccctcctgcggagctccactctygaggctgcggcccaggcttgctgcttgtctggctcttcccggtgctgggggtggccgttcagcagcttcccggcaggaccccttgcttagtcctcactccttgcccgctcagagccacctcagctgctccagcactgtctagggggtgtgttcattacccatctggttacttttgttacttatatcctttttaaaaaagaaaaaagaaaggtctatattagagattcaaactgattttcttaataacagctttatcaacatgtaactcacataccataaaatctgccctttttagtacatgattgagtggtttttagtatattcgtagaggtgtgcagccatcatcaccctagccaatgttagcacattttcctcggtctacagagcaaccgtgcacccattagcaggctcccccacctcccgcaggcagccaccagtccactctgtctctgcatgggcctgctgtggacacttcacatcgatagagtcttttttttttttgagatggagtttcactcttgttgcccaggctggagtgcagtggcgcaatctcggctcaccacaacctccacctcccgggttcaagtgattctcctgccccagcttcccgagtagctgggattacaatgcgccaccacgcccagctaatttttgtatttttagtagagatggggtttctccatgttggtcaggctggtctcgaactcccgacctcaggtgatctgcctgccttggcctcctgaagtgctgggattacaggcgtgagccaccgtggccggcacgacagagccttttacgtggtcttccttcacttgtagttgcatggatcaggacttcattccttttctggccaaatgatattccattatatggatataccacaaggtctttactggttgatggacatttgggttgttcctatgtttgggctaataagaatattactgttataaacatccacatacagcatactaaaataattattaatgagttagtaacatctgggatttgcttcaaatacactctgwgcatccataatctgaaaatccaaaatgttccaaaatccaaaactttctgagtgccaacatgaagctcaaaggaaatgctgattggaccatttcaggtttttggattaaggactcttactgataagtataatgcaaatattccaaaatttggggggaaaaaatacaaatccaaacacttctggcccaagtatttcactcagataagggatactgaccctgtgtggtgagaacaggggcaggaagtggggctatcagttccagagactggccgggaggtgtgatgcctgatgaactggctgtgtggggttgggagctcatacactgttctgtctactttagcatatggggctttgttgttgttgttgtattgttttgagacggggtytcactctgtcacccaggctggaggagtctagtgatggcatctcggttcactgcaccctcagcctcctgagtagctgggattacaggcgtacaccaccaaacctggctaatttttgtgttttttgtagagatagtgttgccctgtgttacccaggttgatctcaaattcctgagctcaagcgatcctcctgcctcaacctcccaaagtgctgggattacaggcatgagccaccattcctggctaatttttgtgttttttatagacatgggtgtctccctatgttgtccaggctggtctcaaagtcctgggctcaagtgatcctcctgcctcagcctcccaaagtgctgggattacagatgcaagccaccatgcctgtccaagagccatatttatttggttacaacttatttagttgcttttgtttctgcatatttttccataccatagagctgaattttcaccaatgcaaaatttagataatttggcgggggggctgttactgtcattaggaagtactcgacatccagtgatgtcrcttgctgctaggtcttgcaccacctagtggcctgatttctaaatggcataaaagccttcggacggtgagtgttgtggtgacctgcctgaggcctttgctaatgcgagtatttcccatttttccttctgaaataaatgttaatagtgaaacgtcgcatatgcaagaattccattaaagcactgccgataatactggaatctgttaaaagcaaaagtgtgaagttaagatgttccagttattcatagagattcccactgagttaaaaaattatagataatgtatgagaataattatactaaagagcctaatgagaaaaattaagaaattcactagtgaagcacctaatttagagggagatcttaaggatttctgtagaaataaataggtagtcctccttacaagtttttaagtttataaagtatgatttaaagacttgtaatatgcaaatactttattgtgtcagcaggttatgttaattaatcatcccttttaaaatatggtgctgctctcaaatttgtttttttcagtgtaatcaatttggctgttaatctgtttaatagtgaccatgaaattttagacgactaatttacatagaactctttctagcagaaaatgctaagggtttaagaaggacccacaaataatcatctgttaggtagaaaagattggacttgagtcacgacaccttggttcaggtcctggtttggccgcttttctgtgaggcttaaggaagtcacaagaccccttcctcatctcagacgggtgtgagtgccggaggatgaaatgagctaatggaagtaggtcatgtatggtggtgtcttgtggggctttatggattccaagtgaaaatagactttctggaggagcagaaaggacagctcttggtatcttgctgtcctgagaactgctccagttaaatatatttgtatttagaggaaattttaaatatgtccctcagatctgaaatttagcacttatgtgacatgatttttaagtacacatagttgtttaggcttagcctgagagagaattttaaattaaaagtagtgtaaccgtttaaaagttattagaggggctgggcgcagtggctcacggctgtaatcccagcactttgggaggccaaggcaggcagatcatttgaggtcaggagttcagaccagcctggccaacatggtgaaaccctgtctctactaaaaatacaaaaaactgagccgggcgtggtgatgtgcacctgtaatcccagctactcgggaggctgaagcacaagaatctcttgaacccagatggtggaggttgcactgagccaagattgctccactgcactccagtgtgggtgacagagtgagaccttgtctcaaaaaaaaaaaaagttatagaaatgtcagttttctctgatcaggcaaggtaattgggagccttggaagttcctttaactgataacttcactggtcctttgtcttccaaatcatacaagtacatcatcatttattacctgcctctaatccatttaaaggaaggggtggtattttatacattgaaatataatagctagcctcctgaggcttggttaacagatggactgtcagctgagtacaagcaaaggaattaagataatgaacacaatctttaatcagaatgaagacaatggaattgaaagcccattcttaggcttgatggttccaaaccttaggaagtgaattattgagaataattgtatcatcctttaaaatgtgaaacgttaaaagaagcagatctggtaagttgaacgttcaagttcaatttgaacattctrtataaaatgagaaccagcaaacgagtctcctataaccatcagctgtaggatgacttaagtcaggctctctagcacatttgtgaaacaatctttctgtaaatggtaagagactgggacatcagtgccattgcccagaggcagcagtcttgtctgttactctgggaatattaaagctaccaggaaaactgaaggctgtgaaaagaaaagaatggaaaggtagggaagttgaaatgtctttgttcatttattttgggcttattttatattttcattgtccacagtataggttgcyctcatctaaccccaggaatgcagttggggtgtttttgttgtttttttgttttgttttagaaatacaggtgggggtcttgctttatctcaaacycctgggcttaagggatcctcttgccttggcctcccacagtgctgggattagaggcgtgagccactatacccggcctgtttttttggttttcttaataaatactttttaaaaatttttttatttaaaatacactctttataaattatgattacatgtttatattgtattttgctcgtgtactgttttgtatttatgaattcatataatcatgtaatcacagcaattccaagtcagacaaacaaatatcaccattttattaatggccaaaagtttcaaggtgtaaagtgacttgtctgtcatacaagtgggggacagtaagacccaggtctgtgtttccgctgtgttgcttttctcatgagcactcttgtggtgtttatgggagctccacgttatacctgcaaattctgtgagtatagccacgtactaataaaaagtgttcttactcactctgtttatatacataagaaattggctgatctrttatcactgatcgttaccaccaccctttgtatcgtaattaaagtgctttatagtaatggcattgtggaagcacacaggtaagtgtgtgctgcttatatggatgaaaatgagaaatcactttactacagcctttgcgtttcctccagaatgagtcgctttttctcttctgacttaacggtgattgtttgcttcatgtctttgccctctgtgatttctcatttttgtttaagtaaaattgccatggtgacattgctgcacaattccctagtgcttcggaggaaacatggatggttagtgatcttaaagacagagtaaggtgctgggcttcggagactcttcctggaggtgcatcttggcatctgcacaatgctgtgcatactcgggtactatttcgtatttagattcttgttcacaaagcatcaagtcctatttccttaaaacatttgtttcttgcttttttttttaacctattatcatactttgaggattttgagatccttacgttttgtattcccaggtagttgaactaaaattcggtgggaaagacatccctgtcaccagcgccaaccggattgcgtacatccacttggtggcagactacaggctgaacaggcagatccgccagcactgcctggctttccgccagggccttgccaatgtcgtcagcctcgagtggctccgaatgtttgatcagcaagaaattcaggtaccctacctgctgactttctgggacacgcttgtcacaggaaatgaacaggctttcttaaaatttacctcaaatgttattatttgaacttttttccttaggtattaatttctggtgcacaagttcccataagcctagaggacctaaaatcctttacaaactattcaggtatgttatcactgctagttattgtttctgaaaatgttgcaggtggtcatatttccaaagtaatttttattttattttaattaatttattaatttattttttttttttcagactgagtttcactcttgtcgcccaggctggagtgcagtggcgcgatcccagctcactgaaacctttgcctcccgggttcaagcaattctcctgcctcagcctcccgaatagctgggattacaggcacctgccaccaggcccaactaatttttgtactttgagtagagacagggttttgccatgttggccaggctggtttcaaactcctgagctcaagtgatccacccccctcagcctccccaaagtgccaggattatgggcgtgagccaccatgcctggcctcaaagtaatttttattgtactcttttgtaggggtaatgtacatggttcaaaaaccagatggctgagtgcagtggctcacgcctgtaatcccagcctttgggaggccggggcaggtggatcacttgagctcaggagtttgaaaccagcctgggcaatgtggcgaaatcccatctctactaaaaattagctgggcgtggtggcatacacctgcagtcccagcgtggtggcgtacacctgcagtcccggcgtggtggcgtacacctgcagtcccggcgtggtggcgtacacctgcagtcccatctacgtcgggtgctgaggcaggagaatcactggaggtgggagacggaggtcgtgagatctcagtgagccgagatcatgccactgcactccagcctgggcgacaggagtgaaaccctgtctctaaatagataaatatatacatacacaacgtacatgggcaaaaaaaaccagatgtttaacatagaagatagataaatggccagtaagcaaataagcacacaataacgatgttcagcatcattagtcattatagaaaaatgccacttacatccaaatgagataaccccacatacccactagctgtctactggtgcaagtgagagctttttgaggaaatggaaatgttctaaaactggattgtgctgatggttgcaaaactctaaacttacaaaaaatcatttttacatataacctgtgtgtatccatgcgtatgtatctcttatctgtagtttgcattgtcctacatctgaagtctaatctttatgtaaaagcaaataatgcctaaggtcacgttgtccccatgatcgggtcataagtttaaggaaatgaaatcagtctgacctttcctttgccaagagattgtcttcggttgttttcattacccatctgcactgagggcttgcaccttyaataatctcagctatgccagtaaataggtttaaaatattatattcattttggtgccaattaatgcacttaagacattttaytggtgttatttctgtagtatattaacaatgagggaacaatatacagcaattattttaggtttagggagcactttactagattaaaagctgtaagtggcagacattacatttcagaatagtggtctcatcatatagtgagattggttgttagccatggtattaatatcagaatgataataagttagaaggaaagatgataaaattaatttagccaccaaatcatgctgggaaaacacccagctgtgttagtactagacacccattgtctgtcatgttagatctgtggccacgtgcaagccccttctctgccgtctgttcagcggcggctttgaactgcagcacggttcttcaaaataaggctcctctgcagtagttcttggtgccygcattcatctttatagttacagggtgatccttattctagctttttatgtatttatttatttattttgagggcgaatctcaccctgtcacccaggctggagtgcagtgatgcaatctcagctcactgcagsctctgccttctgggttcaagcrattctcccacctcagcctcccaagaagctgagattatgggtgcgcgccacaacatccagcgaatttttgtacatttggtagagacagggtttcaccatgttggccaggctgctctcgaactcccgacctcaagtgatccgccagcccgggcctcccaaagtgctgggattacaggtgtgagccactgtgcctggccctgctttgaccctccttaagttgctctccccttctcgtactttgcccatcgcctccacataattggcggtgggtggggtgggggcggggggaggcagagaattccgcttttgcatttacaatcggtccttcatatctgtgggttctgtccacatccatggcttcaaccaattgcagattttaaatatttgaggaaaaagcaatggttgtgtctgcactgaatgtgtgctaagcaatatagtgtcacagccatttacacagcctcggcatgagatgggattgtaccagtgctctagagatcatggaagtgcacagcacgtacacaggtgatacacacatgccacgccrttttagagaagggacttgaggatccatggactttagtttccgtgggkgtctggaccaatccctgtgggtcctgaagggtgggtgtgctttgcatttcataaagcatgtgttcattttgccataggaggctattctgcagaccatcctgttattaaggtcttctggagagttgtggaagggttcactgatgaagaaaagcgcaaactgctgaagtttgtaacaagctgctctcgaccccctctcttggggtttaaggtacacaactttcatgacatttgctttaaagaccacttcataataagaaaggcagcagaacattcagtagrgttaaatgaagtccttttacatacacttttgtttttatcttcagctagatttttaattaagtactggttatgatgtatatattttggtgctagttttatttggggttgctttttttgtttgttcacaataacctagtcatatgatagttacacattgtggttatgattgcctgtgaacaaaccgtacatttggagggactatttgcaatattaataatgtctcataaatctgtaacacatcttgggctttttgctactgaactgaagcaggtacaacgtagagatgttgatggagtgtatatgctactgagccttattttaccacttctggaaattaatgttgatcttacgtaatttggcttatttttagcaattaaaattgcctcaggcagatggatcatttgaagtcaggagttcgagaccagcctggtcaacatgatgaaaccctgtctttgctaaaaatacagaaaaatgagccaggcatggtgccctgtgcctgtaatcccagttacttgggaggctgaggcacgagaattgcttgaacccaggaggtggaggttgcagtgagccgagatcgcgccactgcactgcactccagcctgggtgacagagtgagaccctgtctccaaaaaaaaaaaaaaaaaaaaaattgcctcaggaacgtctaatcataattcctgtattcactgtaaattaaaataaagccatattaacatttaaaaatgcacacagtggtatatatattatagaataatatataattagataagtactgtatgtgatttgtgcttatgaaacttcataggcattcactttcttttttccttttttctttttttttttttttaagtaagatgagcactcgctgtatcacccaggctggagtgcagtggtgtgatcacggctcactgcagccgcagccacccaggctgaagcaatctgcccacctcagcctcccaagtagctgtgactacaggcatgtaccaccatgcctggctgacattttgattttttgtagagaagggtttcactgtattccccaggctggcctccaactcctgggcccaagaaatcctctcacttcagcctcccaaggtgctgggatgacaggtgtgagccaccacaccatgcccagctggcattcaccttcaaataaccttcaatcagaaagagttcctgcacactcatgtagtcccagctactcttgaggctgaggtaggaggattagttgagcccaggagtttaagaccaacctgggcaatgtagtagcgagatcctgtctcaagggggaaaaagtaatgttaaggttttttgctttgttgttgttgttgctgttttgtttgtttctttgtttttgagacggagttttactctgtcgcccaggctggagtgcagagggcaatggcgtgatytccgctcactgcaacctctgcctcacagggtcaagcaattctcctgcctcagcctcctgaatagctgtgattacaggcgtgcgcctccatgcccggctaatttttgtatttttagtagagacggggtttcaccatgttggccaggctggtctcaaactcctgacctcaggtgatccaccyacctcagcctcmcaaagtgctgggattacaggtatgagccatcatgcccggccccccaagtatttttttatatttctgagtgaagctattctttaactttttacttcgaaactattttaaatgtatagaaaagttgtgagaattgaccaaataacttctaaacccgcactgaccaattgttaacattttgctacatttactttatcattcttttcatgcatttctttcctgaatcatttgagaataggttgaagacatgaggtcttccctaaatatctcagcacatacttcctaagaacagagacagttttgaaacggccacaattaaattattacaagtcaggaaattgaactctgacatacggcacttaccttatcgaatccactggctgcacagtgtggtcctgggaccagcagctgcagcatcacttgagcacatgttaaaaatgaacattttcaggccccactcagacctgagtcagcgctcagtgggagcggagccccgcagtcacgttgtgaccagctcttcaggtgttaggccggttgtcccttcgcgtccttcatagaatctgatccaggaccacacgttgcatttaattggcgtgctctttagtttcctttcttctgtacccccattttcaaggggtgcaggcaagttatcttgagaatgttcgtcaatgtgatgtcgcagccccaccgttgggagtgtacagatggcaacatattttcacacagtgtgtttatgaatgttcagagcaagccttcataatggccaaaaacgaaataattcacagtacatgaactgctagtaaatactatagattaagagatatttagaatttaaaaggaataaatgatatctactacactgtgtatgaacattgaaaacactgtgctaagtgaacgaagcaagacacaagactacgtattattatatgtaattccactcggataaactgtcctttgaaaggcacatttagagacacagagcggrtcaggggctgcacagggctggaggtggcagcgggagcttcggagaagtggagcgacccaaaaccggattgtgggggtcgctgcggaactctgtaaatttgctaaaatcattggattgtacatttaaagggataatcttatagtaagtcaagtacacctcaattaagctgttcttaaaaattgactataaactaacacagcatctcagttagtgccctcagaactggagttgggacccagtagagaggtggaaagaagtgaggcctaagtgcagtgagtttgtttcaaataggtcaatcatcgacgccgttatgttctggaagtaatgaataataaagacgtataaacttaaacgtgttagtgaataccatcactcaatgatatcagtagaaatgataatcttccaaattgttggagagaaaaaataaccatgcaaataaaacaggacaaacagaaccaactctgtttaccagatatggggggtgggggtgggaagtaacattcagaatcgtaaaatagaaaacatagaatgagagaagcctgaatgttacaacagtgagtgcggagaaactgacgtaatgaaagaaaaagactttgagacagggccaggaaaacgctgccgcctacaagcaacacacctaaacggagtgacccagaagggtttagtggcacgtccaggttcgtgtgtgaagaaatagatgggtccccttcagagtttgaagcatgacccatgtgaccagataggagaatctctcgagcgcagggaaagctgggtgctgcctgtgtggtggcagagtctggagggcttgctgtgctggggactaaagagcaggaggactgcaggtgaggygtgcagaygactttttatcggtaaagattttaatgccatttggtaattttgtcattaacatttattatgatagacaaggcttctagtatctttgtttcaaaactggtttgttccaaagctagagataagaaaattatgcatctcatctagtttcataaaaggaagtttggaggacctgctcccatcaaaacactggaagatgcagagacttttgtcagctcctggctaattagataatgctaatcatgtgagtagcaataaaaattcgaagtcctgccagacgtaggttctagacattctgacagccaactaaagagccagcaataacgtgtgcctaggagtgcgagagccttctccacctccgtgatgcctccrggttcgtgcatggccacttgtgctgcgtgagcgtcgtaggtttaggggaacagaagtagagggatttacatgagcttttaaaatcccaaatagactggccaggtgcggtggctcacacctgtaatcccagcactttgggaggccaaggygggtggatcccctgaggccaggagttcaagacgaacctgaccaacatgatgaaaccccgcctctactaaatacaaaaaaaaaatcagccgggcatggtggtgcatgcctgtagtcccagctacttgggaggctgaggcaggagaatggcttgaacccggaaggtggaggttgcagtgaaccaagattgcaccattgcactccagcctgggcaacaagagcaaaactctgtctgraaaaaaaaaaaaaaaaaaaaaaaaaaaaaaaatcccaaatagactaaaagggaaaatcctaccccagtcaagaccccrcacaatcataattgagttataccgtggaaaacactttgagcatccatgagacggtcttactgttttttttatttttctcaatgttctaacatatgtgaaatttaattgatttttccatgataagtgtttttgaagttgttatatgttagacatccagtttggaaaaatcatcttaatatttaggctttccggttagcttagtatgcctggatttgccagggctgcagaattaatgtagacttaaaggaagagaatgtctttcagttgaagtactataaatagcaaaggcaggcaggcataattttaaagttatgaaactccttagtgccagattattggagaagaataacatctgctaaagctaattaaagtttaatatgtttaataaatgtgattgttacagacaaaaaatcattaaagtgctgtagaaaattgttaagttaccatcaggccacataataaattaatgatttttctcactctgaattaatgcaaattcccgttgtactgtatttaattatgcacaaaatggtgcccttgactcagatttcagtgaagaacttcatttttttacttttaagtctccaagtaggaaattcaattagcgttatgaaagaaacactaaaatgtggcatttaattgcaaaatatattttaagcttttcatttatccagtgactttgccagcagtcactgaccccttcattcagagatccttttctgtttcaaaaatgcaatgcttcctttttagtatattcaagcatttgtgaaaattattgccctcatgtactcagaatgctgaataataagtgtaataaatgttatttctggttctcctttggttctcattctaacatttttatgagagatttaaaggagcaaataaactataattagaaaaaaaaagacaatggattttagcacatattatatgccacatatatattttttaatgaagtttacatttaacagtaaagagacctacaaagatcagtaataagaatcatgtaagtctcttcataggcttttttttttttttttttttttttttttttgagatagagtttcgctcctgttgcccaggctggagtacaatggcccatctcagctcgctgcaacctctgcctcctgggttcaagtgattctcctgccgcagcctcccgagtaggtgggattacaggcacctaccaccacccccagctaatttttttgcatttttagtagaggcaggatttcaccatgttggccaggctrgtctcgaactcctgacctccggtgatccacccacctcagcctcccaaagtgctgggattacaggcatgagccaccgcgcccatcctcttcatagcattttgtgggctgtgctcttactagttttacccttaacataaattatatgctaaactcaacatataattgaaacaaaatccaactgaaatgtgggtgtggccagttgggtgcctgttgtgctttgtgacagcttcagtgcttccaaaggttcctgcagaatgggacattgctctagtttgattcacatttgactacaatggttagaaggtaattaccttttctattttttaaatttttttgaacataaactcaagattgtattgtcttcataataaaacaaaagatgacacttagaattggatgtcttggcccttcctcctcttctgtcctcccagttcagaatgctcacatctctttatatccagcatcctcttacatctgcacctatgctcaacgcactcaagcctcagcacaagcttcttcgtagttctagccttttcccggaaaatcagcttagtctgcccaccgtagccgctatgcttcgtgtcctaacaccaccttccccgggcacctgtcctaacgccaccttcccaggcacctgtcgtaacgccaccttccccgggcgcctgtcctaacgccaccttcccgggcatacagagaatccgtgcccttttgtgccgtgtcgctttgtgggcttgccacacttacagaaagtcgaacgggggccgggtgtggtggctcacgcactttgggaggctgaggcgggcggatcacctgagttcaggagttctcgaccagcctggccaacatggcraaaccccatctctactaaaaatacaaaaattagctaggtgtgatgatgggcacatatagtcccagctactcgggaggttgaggcaagagaattgcttgaacctgggaggcagaggttgcagtgagccgagattgtgccattgtacaccagccttgttgagagagcaagacgccaactcaaaaaaaaaaaaaaaagtctagcaagtattaggaacattcactttgtgggagcgctgttggcaccgaaagcactttttttatattggattttttttttttttttttacctttcagtaaaagtaatgttttcattatagaaaattggaaattgtgatcaagtataagaaacctatatttcctcccattctaaccattatttttttatgtttccttcctttaattagtatgtgttttatctacctacatgagtgtgtgttaatgtagatatgcataattttttctgtttttggtagaggtagggtcttgctctgttgcccaggctgtcagaaactcctggccttgagtgatctcccacaccagcctcccaaagcactggtactacaggtgtgagccaacatgctcggcctgttacacacacacacacctgrtattacaggtgtgagccaacatgctcagcctgttacgtgcacacacacacacctggtattacaggtgtgagccaacatgttcggcctgttaagcacagagacacacacctggtattacaggggtgcgccaacatgctcggcctgttacacacacacacacacacacctggtactacaggtgtaagccaacatgcttggcctgttacacacacacacacacacacacctggtattacaggtgtgagccaacatgctcggcctgttacacacacacacctggtactacaggtgtgagtcaacatgctcggcctgttacacacacacacacacacctggtactacaggtgtgagccaacatgctcggcctgttacacacacacacacacctggtactacaggtgtgcgccaacatgctcggcctgttacacacacacacacacacctggtattacaggtgtgagccaacatgctcagcctgttacacacacacaaacatatatatttttaagacagagtttcactcttattgcccaggctggagtgcaatgcgtgatctcgtctcactgcagcctgcaacctctgcctcctgcctcagcctcccgagtaattggaattattacaggcatgcaccactacagccggctaattttttatttttagtagagatggggtttcgccatgttggtcaggctggtctcagaaatcctgacctcaggtgatccacccgttgtggcctcccaaaatgctgggattacagtcatgagccactgctcctggtcacgtaatttttaaatataattttagctgtatcttgtgttcagttttctaggctacctttttcactcaacattacatcaggatcatttttcctcatgttattctttgagatatttttaatgggcttgtagtgtcccatcatgtgatttaccagtttactttctgttttttagttgtttacagctcttccttcgttgtgatgctgtgaacctcttgtgcataaattatcatgtgcatctctaattatttcttagagtacagtcccaggagttgtgaatgtgggtgaagcccctgctcctgctgccaggcccacctctcagagagtttcgtgtacacgtgtgcagggaagggctgacctagctaggtctctgaaacccgtgccagatactaaatctgcacaggctgcgacagtgagcagactgagggcgatctgtgccttattgtcttcctgttggaagagaacacataaatcacgtatctcaaatgtgaggcaaatagctaatggtgtttgtgtatacgaggaaggtggagtcaccggttcttcgtggccatcagaggaccgacacgcccataggtctcatgcattaagtctgcgttgagcaatccctaacacggtttttgcctacagatacatttgcacaactgtgaaaacyaggtacgtattcattgcatcattttttgtaaaaagctgagagaagtgcccagcaacacgtcgtgccgcgcgtgtgcatggaacaccatatagcctcaccattaataggcaagatgagcgagacccattatcagatgagaaaagcacrgcacggaatactgtgtccaatgtgctcaccgtctcaattttaaacctaaaggagggagaacattttctcatgcgtgcatttcatctctgggagcacttaagacrctgaagcgttggttgccagtgggaatgggaactgggtatctgtgatacagggatgagaattttcacactgtacctttaaataccagaacrtcatgaacacatctgaaaaacaatattcaaatttccctgatcatctttcttttttgttaacaattatttaaattctggcacaagcaagccacttttcatcatgcatttggtctatagatgttctacctccctcaatttcgtcttgtaatttaatgaataggggaactggggccgggcacggtggctcacgcctgtaatcccagcactttgggaggctgaggcgggtggatcacgaggtcaggagatcgagatcatcctggctaacatggtgaaaccccgtctctactaaaaatacaaaaaattagccgggcgtggtggcgggagcctgtagtccaagctatgcgggaggctgaggcaggagaatggcgtgaacccgggaggcggatgttgcagtaagccgagattgcaccactgcactccagcctgggtgacagagcaagactccgtctcaaaaaaataaataaataaaaataatagggtaactgggttgcttctttgtatctcttgaaaactgatagaggtctcatcagattctaaatttgaatttttctttttttggcaataacatcacataggtaatgtcgtatgcttcccattcccttaatcatcgtggagatccacttctcgtgagtcatctccccacaatgctgggatcgatctctgcgtcagaattcctcttgattttagtggtcacttatcactgcctagatccattgtttaatgtgcttctaaaacagccgtgttctaattacataattgtataatttattagctggaattttctatttaaaaacagctttgtttcttctcaccaatgatttggttaacccgagtaatagcttgtacaggaaagatagaataaatcttgatcctttttaaaaaatttttatagacagggtctcactgtgtgttgcccaggctggagtgcagtggtgtgatcatacctcactaacctcgacctcctgggctcaagacatcttttcacctcagcctcccaagtagctgggagtataggggcagaccaccacacctggctaattgttttgatttttatttttagtggaaatgaggtctcgttatgttgcccaggctggtctcgaactcctaagctcaagccatcccccagctaggcctcccaaagtgctgggactacaggtgtgagctatgcgcctggcctggaatgttatttatccctttttatgcctgaagcacagtgcataatcttttatgtaagttagaactaagccatcaatgtaattttttaaaaaagmaaatgtgggccaggcacggtggctcacgcctgyaatcccagcactttgggaggcagaggtgggcagatcacaaagtcaggagttcaagaccatcctggccaacgtggtgaaaccccttatctaggaaaaatccaaaaattagccaggcrtggtggcaggcacctgtaatcccagctacttgggagactgaggcaggagaatcgcttgaacctgggaggcagaggttgcagtgagctgagatggcgccattgccctccagcctgggcgacagagctagactccatctcaaagaaaacaaacaacaacaacaaagcaaatgtggtttcgggaaaatgtgactgcaatggtaactttactgattggagcaggcacattttgtgtactttgtattaaaactcatgtaatgccatgcttgttacagtgayatcttgcacacrtgctgtttttcaggagttgtatcccgcattttgtattcacaacggaggctccgaccttgagcggctccccacagccagcacctgcatgaacctgctgaagctccccgagttctatgacgagacacttttgcgaagtaaacttctctatgcgattgaatgtgccgctggctttgagctgagctgaagctgatgctggggtcagacccctacagagaaccagtgcttccttcgtcagcagcgcctccccagacccacgaggataytcacactgcacgcctgaggctctcctaagctccttctttcattctgccattcctccctcccttccttttttaaatgatttttattacggtgtggtcacttatttagatggacattgcttttcaaataacttaaaataacacgttatgtgccatgtggctactttagtaatattgccaagaagagcacagtttttacactagtggcatctcagtgaaattaaccaaagatgaagctttggctttgctggtgagatcagagccctcctgagcaggcagcgccactccagggttcagacagggctgcacaggcggcagagatacagggtctgagggctgagacgccatggggccgctgctgcttatgtggttggattgtttacaagcctcattattaaaactgaaggcattttttttttctgctgcctttcccaaagtggttaggtttggaaaagagatgatgatggtaatattttatttgtgctttttaagccatttccccaaatgggactagcatgcttgttttcagtataccgtggcctgcctcatgatggtttggagatactgtctgtggatgtgaggtggggacttcattcattgtcctatttctatctccactttgtgcctggagagctttcaggggaggtggaggaggagggtctgccaagctactgcaacatctgtcacccmctatacccagttacttgggggaggacagacactgtggtgtcattaaagttgtttgaaccaaagtggcggctgcatctttgtcccgatgctagccgtgccggtctcccatcatccgctcgccctcctttcccctgggctgcgcccacttgtcttcctggatatttgggggtgactcgccatgcttggcaccctctgcttcctggtgctgctctgactcgaagacgggacagtccctggtgcacatccagggaagaggagygtcggtagttcttgcagtaggcactttatcaggacctgacctgttgctgggtgattttagtctctacaaacagaaagcgtttcaaagcgtcagctgtgggagcagagtgaccctttgctgatgctggggggaggggatctaaatcctcatttatctcttctatgtctmgtattttactgtcactggaggctctgtgggctgtcatagttaattgaccataattagcaatatacttttaaagtgggaaagctgaatgacacttttaagacaatgaacattatcaaaacaaaatgtataatttcttaatttgaataataaattaagcgtttaaatgctatttgtagtcttgatatacagaaataaaataattagggttggtcttttttattttaggttgttttatgttgaatgttctatatcttattagttaatttgtatattttattagtattttggaaatagcatatctgagactgaagagaaattgacaattcacttatttgtggtttttttctcagctattctgagcttatttatttatttgtatgttctaatggctaaacatttacattaaatgttttttttcccaagattgtgttggagtcctaccccaaatcattgtgattagcacagcttctgaatgttactagttttatcacaggtgtttgcatgtcaccagctaatggagtatagtaagatggcctacactcactgagaatcagaggtcctcgggaggatgcctgtcatcaggggtgggccgagcgtggctcccaggccggcggccggtgtgctcctatccgaccagccacgggtgttggcttcccgagtctcccattgggtctggcattagttcttgaaaaatttctggaggaagattctttgttctttgttttgtttgcccttttctacgttctgtcctactttctgctttctggtaattttgtacacaaacctaaatgttgacttggggttattgcagatacttctcatgaggtgttatctgcagagagatctttgttttggtatcctgagctcgttaaggcagctttatcgattgcagtggtttacaggatggtgtgtgcttttgcggagtgtgggaaaccagatactgcatccctgcccatcgtgagcctgcagtctacactctatgtatccctgccgttgacatgcaggcctccagtggtggaactgggagcacgggaaaggctgtggtggggttaatgactccttccaggaacttcctgaggaggtgagtggtgaacctgaaataattgaatacgtaagctttctcatacttgaaagaaataaacagccaaaggcatatggtaactcaaatagaaattcagggcatgctcagctctttcagatccacctgctccgggtcagcaagcatcacaactagcagggtagtctaggaagtgacgcagccaccctgtgcatccctcacagaacagcaggttcacctggaggtttttctaatgagaaattacctagacttcccaaacacgggctgaatgctggagtgctacactgtggcatgctgggatcaacccagagggcttttcctggtgcttggatggtggtcaaagttggtgacctgaagagactggtgaccagcatgtccaggtgggaaaaggcactgactacacaaaggtctctgcttccagaaaattctgagggtaagttcttgagcccaagtgctttgtgcctcgactgatttatctgtgaaacagggacagtctggaggcttgggtttcacaggagcattctggagatgccatgagcattgtagacaggcttttgactttcacatactgtaaaccacgttttaatttgtctccctaggcggttggtgtcacaggttgcaaacatcacatcttcaaaagtctgccctaacagcctacaaggttacaatagttttggccaaggtcttaacaataaaaatattgctgtataaaggcaacgttactactactttttcttctgcagaggtaggcagaaaacggtaatctctttaaatgctgttctctttttatgtgcatttttctttttttgagacagagtctcgctcatttgccctggccagagtgcagtagtactatctgggctcactgcaagctccgcctcccgggttcaagcgatcgtcctgcctcagcctcccgagtagctgggattacaggcgtgagccaccgcgcccggccccacttttgctttaagaggatggttcacgttctgattactgagatggattgctgtggtttggattcatcgattgcgcacttctaaatgttgacaggaggcagtgtccgtcattagcttataactgagggccttatttatgttcaaaatactgagctgaagactcttgacaccaattttaccgttcagataggagctcccaccaccagcctcgtcttccctgaccctggagtgggcaaaagcaaacatagaggctcgaagggtgtcacaggagggaaccatagccagccaactggggctgcctagagaggcaaatacggcagaagtcactgggtttttctttctgcacgatccagaataaagaaaggcacacctgttgtgctcattaaggtgatcttatgtcatggaagcagcctggtgtcagtcttgaatttatcgtggagggtgttcacatactgagtcacccaaagaattcaattgctggcaatgtttcttagatttgtggatagcacaaggtccatgcgtctccttgaactgccaggattgcagacagaagtccgcctccacgatgggtgctccacgccttcacagctcaggacccgcatgtgaactggccagcgtcactccacgtacgcaccgtgctaggtaatgggatggcgccgatggactgatgagtttgaggtgatgactgaatggatgctgtcgtgcttgcatccacagacttgacaggaccagagctgttagagctcattcaagtgtgaggggggtagtctttcttaaaatggtatcgtgttcatggtcatcagctccctgtggctgctgtagcaaattaccacaaatcaggtggcttaaagcagcagcatttctctcctccagggatcaggaggcctcacagcctcagggaggaaccctttgtctcctccagcttctggtatctggtgtcttctccccctgtctccagtgtcctgcctttttcctatagacacccctgtaatccaggatgacttcatctcaagatcctcaattacatctgcaaagactttttccaaataaggccatgtatgtacacatgtcctggagtcaggacgtggcctgtttctttgggcagccccattctggctgtgttgatttaagtgtggtaggtagacccgtggggatttcgaaacgtgttctggttgtacttggctgttgcccacgcagacgcaaacaagcctttcctttgactcagtaaaacgagcggtgcatgagatcagtgttcccggcccttcctgaaggccattgtgtctctaggggttggggcttagcagtctgtattttttatagtgtcctggataatccttcacaggtgatttctggaaaacaattagacagtctcaaaaaatcctttcaatgttaaaaacttctaggttgggagttgcagggcattccagctgatttgcctggagttcatttctggtgctccagggagtcctgatacccgcagcacctgggcyggaacctccagctgtacgtgccatccaggctccatggaggatggtctgtggcacagctgccgactgctcggctgtggcctggcccacagcccttcgagcctctacgtttgcttttgcccagtcgggggtcagggaagatgaggctggtgctgggagctcctatctgaaccgtaaaactggtgtcaagagatcttcagctcagtattttgaacataaaataaggccctcagttataagctaatgatgggttctagaggctaattgcagcccggagccagacgtgagactccagtccggactgcgttctatgttcccgacacgcgggctgtccctaggcacctggccctcctcaggtcagcctggcctyctcccactcaacacctaccactgcatcacagaccctcccaacaacacctgaggccttcctgccgctttctctgcccctccctgtcccaagccattggcttagaattgcagcaaagtgtcctccgtcctcagttcctgcccactgccaaagtgaccctgacctcaagtcagttcatgacactctgggcaagaccttccagtgtgtccccagctcagggagagctgagaccctgtcattcgcccctggtgccatcagaccgcgcccctccccggcttggggccctgggatgtgtgctgtgctgtggcgcatggctgatctcgtgttgtacagcagtttattgcccagtgccacctcccctgccacacacaccctatttaaaacacagcccccctgacctcagcacatccatcctctcttattggtatctttctctagagtgctgattttcatctaatacaccatgtacttcactcacctattacttcctttctcccccaccatgtaagtttcatggagggtgggaggttagtaaactgctgtttaccaagcatgtagaataacgccttgcacacagcagatgctcagtaaatactggttgagtgcatggatttgctacatctatggagaacagtcttgctaactaaggtaaatttcaagttagcccctgtatggttcctaccctcaattcttggacccccatttttctcacgagagcctccctgcggctgccagccggccctagctcagggtaggagtgggcgcccggtgcaggccgcccaggcaccgcctttctggtggtcccactgcgggcagctgcccacgtgtccagcaagtgcctgcctggcctgctccagaccccgggtcggcttcgtggtcctgggcagtgcgtgggctccatctggtggtcaggagtgggcactgcgtgtggaagggcgcccggcgctctggaaggtgatcttcacccgggtgcctgcccccgcaaccagagtcagcaggcttgcactgcttgtgtctcctcatcaggaagtggctaataaaatagcaatataaagctaaccttttaagagaaatgttaaagtttttgagatggagtttccctcttgttgcccaggctggagtgcggtggtgcaatcttggatcactgcaacctctgcttcctgggttcaagcaattctcctgcctcagcctcccacatagctgggattacaggcacccgccaccacgcccagctaattttgtatttttaatagagacaggattttgccatgttggccagggtggtcccaaactcctgacctcaggcgatccgcccaccttggcctcccgaagtgctgggattacaggcgtgagccactgtgcccagcagaaatgttaaagtttaacatcccattgccttagttcctcaaatgttacacacacagcagcaagccagcagtttctactaggtttacagtagagaagggaaacctggccaggcacccgagctcatgtctgtaatcccagcactttgggaggccaaggcaggtggatcgcttgaggccaggagtttgagaccagcctgggcaacatggcaaaaccccatctctacaaaaaataaaaaggttagcagggcatggttggtgcacgcctgtggtctcagctactctggaggcagaggcaggaggatcgcttgaacccaggaggtcgaggctgcagtgagctatgaatggcaccactgcactccaaccggccacagtgtgaaactctgtctcaaagaaaagtgaaaacctttgtccacacacagacttgtacacaaatgttcatagctgccttattcacgatcgccaaaggatggaaacacacaagtgttcatcagctgaggaaggaataaacattatgtggtccctctgtgcagtggaataggacttggtcgtaaaaagaagtgtgggccaggcgcggtggctcacgcctgtaatcccagcacttttggaggccgaggcgggcagatcacgaggtcaggagatcaagaccatcctggctaacacggtgaaaccccgtctctactaaaaatacaaaaacaattagccgggcgtggtggcgggcgcctgtagccccagctactcaggaggctgaggcaggagaatggtgtgaacccaggaggcggagcttgcagtgaaccgagattgygccactgcactcgagcctgggcgacagattgagactctgtctcaaaaataataataatagtaagtaaaaggaagtgtgatacacagcagcatgggtgcgcctcagggacgttagatacaaaaggacacatgctgggtgactccttgacctgaagtgtccagcacaggcacatccccagaggcggggtgcagactggtgcttgttagggcttaggagggaagagacgggcactgacagctgatgggtacagggcttctttgggggctgacgagaatgttctggaattggtggtggtggctgcacaatcttgtgaatatacttagaaataggaaactgtacacagctggcccttgcgtaacacggtct

SEQ ID NO: 93641 - DNA, 39312 bp, Homo sapiens
gatacttagattttatcctgtgggtgataggagcagttggagggactgaagacaaggaaagaaacatgtttcaagatctatgtttttcaagacgctttctggtggctgagtagggaattccctggataagtcctgcccagggtcaggcaaaacaagttagggggttactgaaataaggagtatgagaaatggtgtaggttgtgctgacgttttgtaacacatctcatgatgatcttcatttccttcactaatttcctgtttcattaattcccttccacgtgctcttctgaaatttgcctcacattctctgatttctcttttacctgttggtttcatcaccttttactttttgctttcctggaaacacaaatgattctgattgtgacatgtcagaattatttgcaacatttgcctttctgctgaaaccatgagttcactgaatacacaatttagtaaagtgtaggatgcacatgtcgttttcgtggtcacaaccagctctgtagcattttataactacactggcagtgtgctgggaggtgtagagagaaatatttatcacatgtgtggctgacacaacctgccaagttattttaggagcctccttggaatcccagcaagaatgctaccggcacaatttgtaatcacagcatcctgctccatgccttggcttcatggcatagtcacttctgcaagtctctttccagctgtctgttcccatgtctataaagtatgagttaaatcatcctaacactactcatcttacaaagttttcttgctgatgttaagagagttgggaaagaactgtataaactgtgaagtgccatggagatgttagtggttactttatcaagaaatagacactctagaatggagtagaaagccaacagttatgattgagtcctcctcctcttcttctttttattaatttataaagaaaagaggtttaattgactcacagttccatatggctggggaggcctcgggaaactctcagtcatagcaggaggcaaaggggaagaaggcaccttcttcacaaggcggcaggagagagagagctcctgttcttttttgtcataaagtctacagaagtgcttatacttcaggacaagggcaggcagagagaaggaaggacattgcttcaccccagccctcactgacgagtttgctaggggacctcactttgtcccagagtaggggcagaactctggccactacccattcagaaggcctgggctgcactgctagttcctcactaactctgtgtggccttgggcaaggttgggcctgtgttaacagattatgaccctgggctctcaagctagaggatctaaatttgaatcctggctctgctaaagcaattagtgatgtaaactttaatgggtcagttaaccttcctgtggcttagtttgctcatctgtaaaatagggatcataacagtatcaataccacatgattgttggacagattgaatcagttaatgcaggggaagtacttagcatgacacgtattcactatcatttcctggagtaagagctgtgtgtgagtgggtgtgagcatgtgtgaaaccttttctctgcaatctcagttaagaaaccaatccagaatttaaagttcagggcctaaatgggtggttatcttctcccagttccatcctatcccacctttgctcttcctcccgcccacaggagctgttggtccttgattgggctggaagacctggtggaccctaagtgatctataagaggagaatagagaacagggaatgtcttcaaaaatcctagagggacacagaggctgagaggcaggcagtcctgcaggggtcttctgattgggacaaggagaaccttggtcttcacaggccaattctggtcagtttcccccatggacagatgaggaaacaggcccaggaatatccaaggtctcacacttcccatctgtcaagtcttgttgattctgttgtattcatgtctctcaaagggagatagagtttagggaagaaagaaggatcaactgtgtctgataccactgggagcttaagtaaagggttcttttacttcatagcatttatcccaatttgtaattcagtattatttgtgtggctgtttggtgtctctttctcctatatgagtgctagcttcataagggcaaggattttgattctttaatatttagtgcttgccacatgccctgaacacagcaggcatacaggctaaccaacatacagtggcatgaaagtcatgaaagtgagacacctacctcctccagtgccaagagagcataaccatgcacctgtcactctcctcaacaccacccccaagcatgaggcccaaaagcattagctaatcccctcctccagccactaaaacttaaaggccaggtgtggtggctcccatctgaaatcccagaacttcaggagacagcagcaggaggatcacttgaggccaggagtttgagatcagcctgggcaacatagctaggtcccatctgtactaaaaattagctgggcgttgttgcatgcctgtagtcccagctactaaggaggctgaggtgggaggatcacttgagcccaggaggtggaaacaacagtaagctataatcacagcactgaactctagcctgggcaacagagtgacaccctgcctcaaaacaattttaaaaataaataagagcaaaacttagataccacgtggtcaccccaacatgcaaaatcaagttttcccctactgagaagaatggggacttgacagctgagttacagagagataatcttcttcttcttttttttttttggtttacatcctcaagatcatgacttgtgaaatttgaatcgaatacacatgtaattccagagcaatgttgcctccgcataccatcagcaattcacttggctactggaagtcaggataagcttcccagaagagaggtaccacttgggctaccaatataaaaggatgaaaatatcagagtgatggtgttctttacaacgttgagtccctggacagcctgtccactgatgctgatatctgagcctaatgcttctctgaatgttgagattgaactttgatccaatgaaactagaacgagaaagaagataagtctttcattgttgataaggacattatgtttctcatacttgtatgattatttttccttagctgtactataattatctgcttatttgtctctgctctatgtgcttagggtacaaagttgaccaagaccaactttggttggaagcatagtactaagagcacagtactgagagcacagtattgagagcacagctttaaaaaacatgatgaaggctttaatacaggaaatgagcaggggagaggcatgtggtggttggatgtatcttccttgacacagtcagtgcagctctcagtagtcaagtccctacatgttagaagatgttaccttctgtggaattaagtggcagaacttgccttcaattattttcctttgcagaacaacaccaactgcattagttaggacacagtgctggctgcatttaagtcccaagcgatgattagtctctcactgttggtatagattcaaaccaatcagaccacctcctaaagtttgtagggcaggtaaatcctcatcttagaataaaaatcatcttaccaagtatgtgttttagaggcaagaagaaaacatatttgtttctgtaagagttttgtttaaaaaaaatataagaaaggctctcggtttaggtgaggtaatgaagttgttgatagttatcagatgacactggaatctttacttctctgaatgtgttctgtgcatctctcagtgtgggaacatagagagggagatcctccagcaatgccactgatatggtcagaaactgcatctttctttctccctgctgagatgagatggagtcctttgttctagaagacccatggtggtgccgctgggagtaacccttgagacaggaacacaaatcccaaccaatttgtggttgcagccttgagtctcactatttcccatagtgatgcgtagcagggaatggcaggtgcaccagagcaggagaggacctaatatctcccttcctgttagctttttataaagttttattgtgatcagtagcagttgggaagctacttgcagtcactgagcctcagtttctacatctgtaaactggggatagtagcatggcccctacttaatgtgctcagcaaagccactgaaaggagacagaaatgtatctaaattccctggacttttatcctacctctcttggggattgtcaccaccttcccatgtttgtcctttttggtttgatgcttgctgtcacttctttccttaggtgcctctctgtacggctcttttatcccagggattccagagttacagcacatgcataccaccatccaagcatgtttatttgtctcctgcttcactaggctgtccccaaggaacatgtggctcccggcacacacctggcacaacactgcacatgacattcacccacttggccttgaatctgacaaggaatctggcatgatgttcacccactcaggccaggtgccgagcagccctggaggcttaggggccagagggatgggaaaaggtgtctttctggggtgagtatcagtttctgcaggagggctgaatgtgagaaagaataaagagagaaggaagcgaacaagcacagcttaaacatcgcctatttctattgagttttaagaacgctgtgattttgtttgtcatgcaatccattcatcaggccaggcagacacagaacttgggtgtgagtgacgataatgagctgatataattttcacaccctcatcactgagatctctcccatcaggaatgggtcagggagctcacaggtggcagcaactgctattacaggcctcatctctaccagctcctggggcctgccctcctcccattagaaaatcctccacttgtcaaaaaggaagccatttgctttgaactccaattccacccccaagaggctgggaccatcttactggagtccttgatgctgtgtgacctgcagtgaccactgccccatcattgctggctgaggtggttggggtccatctggctatctgggcagctgttctcttctctcctttctctcctgtttccagacatgcagtatttccagagagaaggggccactctttggcaaagaacctgtctaacttgctatctatggcaggacctttgaagggttcacaggaagcagcacaaattgatactattccaccaagccatcagctccatctcatccatgccctgtctctcctttaggggtccccttgccaacagaatcacagaggaccagcctgaaagtgcagagacagcagctgaggcacagccaagagctctggctgtattaatgacctaagaagtcaccagaaagtcagaagggatgacatgcagaggcccagcaatctcagctaagtcaactccaccagcctttctagttgcccactgtgtgtacagcaccctggtagggaccagagccatgacagggaataagactagactatgcccttgaggagctcacctctgttcagggaaacaggcgtggaaacacaatggtggtaaagaggaaagaggacaataggattgcatgaaggggatggaaagtgcccaggggaggaaatggttacatctgtgtgaggagtttggtgaggaaagactctaagagaaggctctgtctgtctgggtttggaaggatgtgtaggagtcttctagggggcacaggcacactccaggcataggtaaagatctgtaggtgtggcttgttgggatgaatttcaagtattttggaatgaggacagccatagagacaagggcargagagaggcgatttaatagattttatgccaatggctccacttgagtttctgataagaacccagaacccttggactccccagtaacattgattgagttgtttatgatacctcatagaatatgaactcaaaggaggtcagtgagtggtgtgtgtgtgattctttgccaacttccaaggtggagaagcctcttccaactgcaggcagagcacaggtggccctgctactggctgcagctccagccctgcctccttctctagcatataaacaatccaacagcctcactgaatcactgctgtgcagggcaggaaagctccatgcacatagcccagcaaagagcaacacagagctgaaaggaagactcagagsagagagataagtaaggaaagtagtgatggctctcatcccagacttggccatggaaacctggcttctcctggctgtcagcctggtgctcctctatctgtgagtaactgtccaggctcctcttctctgtttccttggacttggggtgctaatcaggcctctctttcccttatctgttttgaagatcaaaaaagatgttcaggccgggcgtggtggcttacacctgtaatcccagcactttgggaggctaaggcaagtggactgcctgaggtcaggagttcaagaccagcctggctaacatggtgaaactctgtctctactaaaaatacaaaaattagctgggcatggtggtgcacgcctgtattcccagctacttgggaggctgaggcaggagaattgcttgaacccggcaggcggaggttgcagtgagctgagatcatgccagtgcacttcagcctgggtgacagagtgaggctgtctcaaaaaaaaaaaaaaaaaaaaaaagatgttcaaggagcagtagcttaagtgttggatgctacaaacatatagaggttattgtagatcttatgcagctctataaaggaataaataagcatcttccccatccatctttagtggcaagaagggttttgggatagcattgattgaggatgatctacttgacaatagtttggacccaaggaggataaggaaggaaagtagtgacggatctcattccaaacttggctgtggaaacctggcttctccttactaaactagaatttggattttacattttcccctttatgttgcagtagaagaggatgaatcctctcactggtgggatcctgccatcctagagcaggtagagagaagagtcactccccactgtgggtagtggaggcttctcacatgtcacatttcacttctacctcaatttcactcttactaagatttgggaatcataatgacaggaaaatagaaaatataaacctcattttaattctttcacagaaaggttagaaattcagtgagttgtggcaacatattttccatcttctgaccttttaacactaattgatatggcttaaattcattctattttaaaccagatttttttggagatagtctatttccaacatgttccttctaggtgacaaatgagggctgttagttcagtatttgttacaataaatgtgtgtaaaataacctcacctttccagaatcatgtcaggaatatgaatctaatgcacaaatgtataactctatgacaagattgcatatatcttttaaaatataccttcccaacgttcattttaatacccctatttcaaacaaacctgcttagcaggttatgttaaacgctcagggcagaggagtaagcaagactgtgagccagtgatgacagcaaaagcatccaggtaggatcaaaatggagtaagaaaatattcctcatccctcagggtagaactccaaagagatattcatgggtcctggccccgtagtggaggtcactcaaaggacaaacatgtttgcatctcatctgcttgaagcctggacacagaggcaccatctgtgtcactctgtgtgtggtctgccatgttgtggggtggtcactacagactcaggcagytgggcagacaataccttagccttagatgatgctgatgcagcccaggagtcagaaactgtagtgcagacaatgccctccttaggccaacacaattaagtgcaatagatgactggcttttctgttagcctcttcattggaaccaaaagcagcattactctaccaaacagaggggagctggaaagaaactacacagtttgcccagcctagcctctgccttgacacggaaccatgtgagtctagacattcacctagatcattccttggggaccaatgctrctgacacattaactcaatagtttgtcctggcctgagaggtcatgtaacttgtagaaagtttagaagcagagattagtgtcatttatttgccatggctgtgacaacaaaggaaggaacaggagtgggaaaacccaaggccaccctggttttggtagatggtgcacacgcttccactarctgttctggggcaaagatccaaatgcactattgggcctggctatgctgcttctgctgggtcccccaaacatgagcctccacgccatttctcagttgtattttaccacatattatcacagtcaccggatttgtacagaatatttggaacctatactgtcttaagggctaccctttaaagaagagaaaacaaggttttaattcaactgtctggaacattttatgtttacttatgtggaatactacatcttttgttataaacaggagggaatgtggacattcgaaggcccctaccttttagctaaaagcccatatgaagcatatggatccatttatacacaccatgcttttcagctacattttcctaatttgcctctctggggccaaccttgtgggactagcagattcatggttgagttgaaggatggtgacctcttccatcagcttttcttcttcctccagtcttccaaccctcagtaacatcagactgggaaggtcttcagacatccagaaaccccagttcggggagttcatacatgacccatcaaagatgagttgcaagcaggcctgccttagggagcaccagccttaatgggttttcctacagagatagttgatgggcagatgcaataaactgactgctttgtgattgaccaccttgagaaaaattagcatgtctggctatgttagtcttttcttgcattgttataaagaaataccagagtctgggtatttataaagaaaagggatttaattgtctcatggttctgcaggctgtacagaaagcatagtgacttcttcctctagggaggtctcrggaaatttacaatcatggcagaaggtgaaggagaagcagacagatcttacatggctggagcagaagcaagagaggctggggagaaggygccacacattcaaaccaccagatctcataaaaactcattgtcacgaggacaacacctaaggcgggatggtgtgaaacgatgagaaactgcccctaggatccaatcatctcctaccaggccccacctccagtattggggattgcatttcaacatgagattttggtaggggcacagattcagaccatatcactggcactgtgctaatcagatgaatatcaccagttggaaggctagattccacaagaggaggaatgacctggaaattggttctttagttgtgattcttctgcacactgtcattcagggaaatatgagtcaatcatccttcccaataggtcaaatcaaccagatcatctgatcayagagactgaggtgtagctgaaagctgctcacatttctatgaggtcaatggaagccttgagcacagttgtcaatctgtagaaataaggactctgtgactcctccaagacctctctgtgaatgacggtttaagaagaaccagatcctaaaacagggtcagagcttagagggaagggaaagcataaaagcctctgagcaaattctaaagacagggtcaccataggctctcagtgaccctctgtgactgagtggctgcagtgatgcaaaatctcatcatcactgcggaagacaaaaaaatgtcaccctttctacctaggatgagaatccccaaatttggggagaggccacttactaaatagacgtaaaggaacaaagtgacctggaagaattcctgcctgaacctctcaggatcattcacatttgagaacatttatcaaatattcattccaggactgggaccatgaagacttcagctgctttgagctaatcattgtaactttttggtgtctcatggtggaggcaggaaaggacctgatgaacaaatataatcattgccgtcagagttactgttattatttcttgccttaatgttacctcgttctcttgagcattccagttcctcagtcaatgactcatcaacccctatatctataaagtcacaatcgctgtgacttgatttctgtttcactttgtagatatggaacccattcacatggactttttaagaagcttggaattccagggcccacacctctgccttttttgggaaatattttgtcctaccataaggtgagtgtttttgagctcactcttttgcttcttatgattgccaagagcagcttagttccatcagtaaaaatgcttctcctcagggggaaggtctgaagttttacactttcagaaacagtgtgtaggcatcacccagaacatggcaatgtttacccaagggctctcttgctaactctcaggaacctcaggtttgcctcagttgaacagcccaaatctcaggtagatcagcaacctgatgctcagaacttgatgtgcaaactttgtgagcgccataaagaaggttttctttttgctctatgcaggttcccaggaaggtacagtcatacttagttagtattaaaagtaggaaaaggaccccctgattgtgacttgttatctgtgtacatgagagtcaaactttcctctctgtagcaagagctcttgagtagccttttttcccttccttctggacagctttgaaactcaatttattagggagcccaggtatttacctttgggtcatttgcacctgcttcaatcctctccgaaaaatgctaaattccctgagggtatctccatggctctaccccagctcttactccccatgacatcttttgcagctttgagagacagaacaaaggggttctgctttatttcttttccttcaaaggctgcaccttatgggtgagwctgatcacagactggatataactgagatgagacagtggtggtcaatcaaactcagatatttaagcacaaaatgagtttgtggggttttttttttacacaaaggcggaatcacatgcaaaatcactagaaaggggatgatttgatgaaattattaaatatttaattttgctgaatagaatataatatgtgccacgtggaccgtgaactttggccgagcctttgtgcctaacctagtctgatgctctgcccagggtctgggccctggatggaaaattaggagcccatgtccacatggccagccgcagcagtcagctctttggcttacatcatctttcccacatacctgaggcttgtttctcagattctaattctctcaggtgagggctttgttgtctaattactatccaggaatttcatattttttccctgtgcaaaagcaataatttccccgccaccttttccaggtcaactctttagtagatgtacccccaagatgcacattcctgggacctttgtttgcacagttaaaatgtcacccctgaaatgtcgatacaggaaggtttgtttttaagtttcagtgaaaactctgagcaagtgttgtaatttgctgtgtccgatgtgtagaggggacattttctcagaacttccatgttaagctggaaaactggaaagtgagttcactttgtcattctgtcactcgttcattttctcactcaacaacatgcctcatacttacctaaatctgctagactaaaggagttccctggtgtctgtaactttccaattctgctagaactctagagcgagctcatgaaataaatgaaaaggatgacaaagagataaaacactgtgcattctcttctgatgctaattcactttcccttggcctcagtttccccatgtgcccctggaggtgaycattcagggattcatgagattttcaagacaacacatgaaaaagcaaaaagacatcagaaagacaaagaggtacttagtatttatacacaaggataagtcattcagtatccacaacacttggagagaattcaagagtgattttaaatttcccttttcaaatacctcctctgttttctcttatttcctttatgacgtctccaaataagcttcctctaactgccagcaagtctgatttcattggcttcgactgttttcatcccaattagaggcagggttaagtacattaaaaataataatcaaatattattttgtttctcctcccagggcttttgtatgtttgacatggaatgtcataaaaagtatggaaaagtgtgggggtgagtattctggaaacttccattggatagacttgtttctatgatgagtttaccccactgcacagaggacagtctcagcccaaagcctcttgggatgaagctcttgtcaacctaactacaaacagagagaagttctctgaaagaagaagatatktatttgggtgtagagtattgcaatgggaatctgcatgcctttataaactatgtgcaaattcagggaagtaaagcaagacaaagaggctccaaggaaaatatgaggaggatttcttatcagttttgaaataattatccttcgctacaaagatcagtaacaagggtgacgcctcaccaaggttggacaggcagttgctgggcaggtgtccttgcagaaatattttttttaatgttgggatggcctttgtgcaagcttgtagttttgcggagtcttttgtgatagttttgttatcaggcacacaagcatgagaatcctctcttcatagccttctttgatttatttgtcagggtttttacacacacacacacacacacacacacacacacaactagtgacatcattttggttctaacaacattcacactggttattgtaaaacttttcgaaggttgtcctaccaaggatcccatgtgtcaccaggtgtcaagttctacagtctgaactaggctgggagcattgtgattacttttctccagactttggtggcccagggactcacagcatcatgctctgtccagtgtctgcctattcccctcttctttttttttttccttaggtgcccttttattacatgtgttgtctcagacccttctaatatgtgctcataaatacatcatatcatctccttcccacatcaattcactttcaattaaaagccaaaactctttcatttagactttggatttaaagtgcttttgaatgaagggttgagagataatagagaaatagattggcaaaccatttatactctgctgttgttgttttttaattttatctgcaagtgtggaacttttcattctgttttgttattaaatttaagccaagactttttaatagaagggtatataagcatttctttgtctataccttcctgctgaatttgaagaaatgctgaatattcttaaccactggcgggctgatggactgtgattttattttattttttatttttagttttttaaattatactttaagttctgggttacatgcatagaatgtgtagttttgttacataggtatacacgtgccatggtggtttgctgcacccatcaacctgtcacctacattaggtatttctcctaatgctatctctcccctagccccccacccaacaacaggccccagtgtgtgatgtttccctccccgtgtccatgtgttctcattgttcaactcctacttaggagtgagaacatgtggtgttgagttttctgatcttgtgatagtttgctgagaatgatggtttccagcttcatccttgtccctgcaaaggacatgaactcattgtttttttatggctgcatagtattccatggggtatacgtggcacattttctttatccagtctgtcactgatggacatttgggttggttccaagtctttggtattgtgaatagttctgcaataaacatatgygtgcatgtgtctttatcatagaatgatttatgctttgggtatatgcccagtaatgggattgctgggtcaaatggtatttctagttctagatccttgaggaatcaccacactgtcttccacaatggttgaactaatttacactcccaccaacagtgtaaaagtgttcctatttctccacatcctctccagcatctgttgtttcctgactttttaatgatcaccatactacctggcatgagatggtatctcattgtggttttgatttgcatttctctaatgaccagtgatgatgagcattttttcacatgtctgttggctgcatagatgtcttcttttgagaagtgtctgttcatatcctttgccyattttttgatggggttgtttgctttttttcttgtaaatttgtttaagttctttgtagattctggatgttagcccttcgtcagatggatagattgcaaaaattttctcccattctgtaggttgcctgtttgctctgatgatagtttcttttgctgtgtagaagctctttagtttaatcatatcccatttgtcaattttggcttttgttgccattgcttttggtgttatatttatgaagcctttgcccatgcctgtgtcctgaatggtattgcccaggttttcttctaggatttttatggtcctaggtcttacatttaagtctttaatccatcttgagttaatttttgtataaggtgtaaggaaggggtccagtttcaattttctgcatatggctaggcagtttcaccaacaccatttattaaataggaaatcttttccccattgcttttgtgtgtcaggtttgtcaaacatcagatggtagtagatgcatggtgttatttctgaggcctctgttctgttccattgatctatatttctgttttggtacctgtaccatgctgttttggttactgtagccttttagtataatttgaagtcaggtagcgtgatgcctccagttttgttctttttgcttaggattgtcttgtctatgtgggctcttttttggttccatatgaactttaaagtagttttttccaattctatgaggaaagtcagtggtagcttgatggaaatagcattgaatctataaattaccttgggcagtatggccattttcatgatatggagtcttcctacccatgagcatggaatgttcttccatttgtttgtgtcctcttttatttcattgagcagcggtttgtagttctccttgaagaggagaacttcacatcccttgtaagctggattcctagatattttattctctttgtagtaattgtgaatgggagttcactcatgatttggctctctgtttgtctattattggtgtgtaggaatgcttgtgatttttgtaaattgattttgtatcctgagrctttcctgaagttgcttatcagcttaaggagttttggggctgagacgatggggtttyctaaatatacaatcatgtcatctgcaaacagagacaatttgacttcctcttttcctaattgaatatccatttctttctcttgcctgattgccctattcagaacttccgacactatgttgaataggagtggtgagagaggacatccttgtcttgtgccggttttcaaagggaatgcttctagtttttgcccattcagtatgatattggctgtgggtttgtcataaatagctcttactattttgagatacgttccattgatacctagtttattcagagtttttagcatgaaaggctgttgaattttgtcaaaggccttttctgcatctattgaggtaattatgtggtttttgtcattggttctgtttatgtgatggattacatttattgatttggtattttgaacccagccttgcatcccagggatgatgctgacttgatcctggtggataagctttttgatgttttgctggatttgatttgccagtattttattgaggattttcgcatcgatattcattagggatattggactaaaattctctttttttgttgtgtctctgtcaggctttggtatcaggagatactggcctcataaaatgagttagggaggattccctccttttctattgttcagaaaaatttcagaaggaatgataacagctcctctttgtatctctggtagaattcagctgtgaatccatttggtcctggactttttttggttggtagcctattaataattgcctcaattcaaaacctattattggtctattcagagattcaacttcttcctggtttagtcttgggagggggcatgtgtccaggaatttatctatttcttctagattttctagtttatttgcatagaggtgtttatagtattctctgatggtaatttgcatttctgtgggatcagtggtgatatcctttttatcattatttattgcatctatttgattcttcttttttctttattagtcttgctagcagtctatctattttgttgacctttttcaaaaaaccagctcctggattcactgattttttgaagggtttgttgtgtctctatctccttctgttctgctctgatcttagttatttcttgtcttctgctagcttttgaatttgtttactcttgcttctctagttctgttaattgtgatgttactgtgtcaattttagatctttcctgctttctctagtgggcatttaatgctataaatttccctctacacactgctttaaatgtgtcccagagattctggtacattgtgcctttgttctcattggtttcatagaacatctttatttctgccttcacttccttatttacccagtagtcattcaggagcaagttgttcagtttccatgtagttgtgtgattttgagtcactttcttaatcatgagttgtaatttgatttcactgtggtctgagagacagtttgttgtgatttcttttcttttacatttgctgaggagtatattacttccaattatgtggtcaattttagaataagtgcgatgtggtgctgagaagaatgtatattctgttaatttggggtggagatttctgtagatgtctattaggtcctcttggtccagagctgagttcaagttctgaatatccttgttaattttctgtcttgttgatctgtctaatattgacagtggggtgttaaaatctcccattattattgtgtggaaatcttagtctctttgtaggtctctaagaacttgctttatgaatctgggtgctcctgtatttgggtgcatatatatttaggatatttagctcttcctgttgaattgatcccatcaccattatgtaatgcccatctttgtctcttttgatctttgttggtttaatattctttttaaaataaaatattttaaacatatgaaacattatggagaatggcatgggaaatatccacgtatgcaccacccagcttaacaaatgctctactgtcatttctaaccatggtctctttgaagagctcttttgtctttcaatgtctcttccttgtttggcccacattatccttcatcatatgaagacttgrgtggctcctgtgtcagactcttgctgtgtgtcatacctaatgaactagaacctaagattactgtgtattgtacaactaagggattatgtaaagtcaggatcaaagtctggcttcctgggttgggctccagctgtagaataaggctgttgatgtttaatcaactctgtttttttcacacagcttttatgatggtcaacagcctgtgctggctatcacagatcctgacatgatcaaaacagtgctagtgaaagaatgttattctgtcttcacaaaccggagggtaagcattcatgtgttgaaattaaaatactgattgattaaatttatattttgaaattcttatatattcatagacagttgcctaaaaaatgtccaggaaggttccacgtccacttcatcctgtcccccccgaatggtaacatcttgcaatcttgcataactataaatacagtatattcatgttactatatagtacaggaaattgacattgatacagttcacagagcttattcagatttcaccagctttatgtgccctcatttctgttctatgcaaatttatcacaatcatagatttgtgcaatgaccagcatgatcaaaacgcagaacccatttgtgttctatacaaatttatcacatcattagtagatttgtgcaatgaccagcatgatcaagatgcagatccactctgtctccatgtggctccctcctgctatcctacagtcacaagtctttttctctgacagggtccatatcagagcaaactattttttattttgaggtgatcaatgtattaatatttccttttctggattgtacttttggtgccatgtttgaaagttctttgcctagccctccttcctatattgctgtttttttctaaaagtcataaagtttaaygctttactaaatgtagctctatwatcaattttgtgttattttttgtataaggtmtgagatttagatcaaggttcattttttttgtggcttatggctgtccaattcctccaacgccatttttggaaagatgggtatattgttaaaaatcaactgggcatacttctttgcatctctcacgtactactgtgtcccattgatcactgtgtttattattccaccaataccacactgtgttgaccctagtagctgtacactaactcttaacctcgtgtagagtgattcttcccacttttattgacttattttttcagatttgttttaactcttcctggtcctctgcttttccataaaaattcagaatgagtttctcagtgtctacaaataaacgtgctgttattttgacaagaattgaattaaatatatagaccagtttatggaaaatgtgtatctttactgtttgatctttcaattcatgaacatagtatgcctctccatttccttagattttctttgattgcttttaacatcttgtagttttcagcatagagatcctgtacatgttttgttagatttacagctaaaytatttcatttttgttggaatgacygtaaatgatattatgtttttcttgtattttcagatattgattgttgttacatagaaatgtgctttgattttgtgtgttgatctggtatcctagaaccttgcagaactgacatagtagttctagaagtctctttgtatatgccttgagattttacacattgtcagttatgtcacttgaaaatagagacaattcttttatttcctttccaatctgtatgccttttatttcttttcttttgtctattgcactaggacttcccagtataatgttgagtaaatgtggtgaatktttgaattgttcctaatcttaggagggaagccttcagttctttcatcattaagcatcatttagaygaagtgggctgtttttttgtagattctctttatcaaattgaggaattttctctccctagtttgctgagtttttatcataaatgaatgctggaagtactcattataaaaaaaatggctatggaagatgaaagaaagtttcaagcatgttggcttgataggccagttccaagttggcaaaaataattatctcttttttctttctatccatgaaataaaaaattaagagmcaagaatgtttatggaattgcattatttcttcaaaatatgttcctagttttaaaggtattacctactatttyttttaaaaccatcacattgaggcacttctttttcacgttgcccatgctgcaggagaacataaagacagcttgtctgaggcaacatacaatccaccaaagtcacctgcttgtctgtctccactccgtctctacactgcagaagtgctaggtcttgattctgtttattgtactggaagaacacattctctaccacgtggataatttgcatgtaaaagaagactgggatatagaggctggagacgacatcagggtctcctgaacactgccgccacccccccgccccgccccacacaaatacatcccargacactgggcatctgggataaatctctattgagcatctagcataggrcccatcacccagtagacagtcactaaatagttgttgaataagtgttcctgtttaacacattttctacaaccatggagacctccacaactgatgtaggacaaaatgtttctgctttsaactctagccttttggtccagtgggatttatgaaaagtgccatctctatagctgaggatgaagaatggaagagattacgatcattgctgtctccaaccttcaccagtggaaaactcaaggaggtatgaaaataacatgagttttaataagaaacttaaagaatgaatctggtggggacaggtataaaataagatcacagtccctttccaaggggtagtccactgaatttgagctgcctaaaaatggtcttttatctttatgtacagaaaacacatcacaaaattcattataaaatgtcacttactgctccatgctggggaaagccatgtccttctgggactagagtctgcacatttaactatgggtggtgttgtgttttgtgcttagatggtccctatcattgcccagtatggagatgtgttggtgagaaatctgaggcrggaagcagagacaggcaagcctgtcaccttgaaagagtaagtagaagcgcagccatggggttctgagctgtcatgaacccctccagckgcctgccatggagctgatattcctgctgttgggttattccagtgaccagacaaaaggagggctgtggtaatgcaacttcaatgggtctcccaagatggggcagctccgatgaggaggtggggcagctggaggaaaaggatcttctcccctgtgcacaggggccagggtttacatatccattaaattgtcaccttggatattctagaagactaaatatatcctttagggggaaaaagtgtgattgtaccaaagttttaagcatggagtgtatgggatggtggaaggggaaggcacttggtatctgttggttggcagtgagtaggttgggagagttataatggagaacttagaataactttgatcatttcatgtttttttctgaggatatcagtagaatactaaatattaaaattcctaccatttctttttcctccagtctcaaagagagagggtggtaaaaacactataggtagggcaagcctattatttgctatctacacttatgcagtaaaaacaggtgtaatctgagtttgtcctgggcagaccagggatatgtggtcactcactatagaaatttccaaatcaaattttgagagatttttttttaaccaggacattattggtcattatattttacaaaaataattctgctgtcagggcaacctcagctcaccacagctggggatagtggaattttccaaagcttgagcagggagtatagagaataaggatgatatttctaggagctcagaacagggtactgttgctttgtaaagtgctgaagaggaatcggctctgggcatagagtctgcagtcaggcaatatcacctgtcttgagccccttaggaagagttaattattctactcttgttctgctgaagcacagtgcttacccatcttgtatcatccacaatcaatacatgctactgtagttgtctgatagtgggtctctgtcttcctatgatgggctccttgatctcagaggtaggtctaattcagttcagtgtctccatcacacccagcgtagggccagctgcatcactggcacctgataacaccttctgatggagtgtgatagaaggtgatctagtagatctgaaagtctgtggctgtttgtctgtcttgactggacatgtgggtttcctgttgcatgcatagaggaaggatggtaaaaaggtgctgattttaattttccacatctttctccactcagcgtctttggggcctacagcatggatgtgatcactagcacatcatytggagtgaacatcgactctctcaacaatccacaagacccctttgtggaaaacaccaagaagcttttaagatttgattttttggatccattctttctctcaataagtatgtggactactatttcctttwatttatcttkctctcttaaaaataactgctttattgagatataaatcaccatgtaattcatccacttaaaatatacagttcagtgatttgtagtacatttgaagatatgtgtgaccatcatcattttaaactttaaaactttttttgtcaatctagagacctcatacatttttagctatcagccccctgtcacaaaccctgtcatcatatgcaaccactaatcaactttctgcytctatggatttgcctattctggacacttcatagaaatgatattaattcatcagggttttttattctctagttcatgaatttgtactttagtctgtatcattttctttcttctgctggcttcaggcttagtttgcccttcttcgtttactatgttgtggcatgaacatagattactgatttgtgatttttttgttcctctaaatttagacattacagctgtaactttccctctgagcacttcctttgctaaatcccatgagattgtggyctatcacatcttagtttttgttcacctcaaaacagtttctatttgccctttkggtttctactttgactcattggktacttaaatgtttattatttaacttccacatatgtgtgagtttctcaattttctttcccttattgattttatctttattccatgataggtgacagagatatgctgtgttatttctatcttgactacctactatttcttgaacagcaagattaattttgagcttcagattatgatttgggttattctaggagactgtagtccaatagataaaggcaaagagattagggcattgaattttgttccttttatccttcaaaagatgcacaaggggctgctgatctcactgctgtagcggtgctccttatgcatagacctgcccttgctcagccactggcctgaaagaggggcaaaagtcatagaaggaatggcttccagttgagaaccttgatgtcttttactcttctggttggtagagaaaactagaattgctccaggtaaattttgcacattcacaatgaatttctttttctgtttttgttttgtttttcctacagcagtctttccattcctcatcccaattcttgaagtattaaatatctgtgtgtttccaagagaagttacaaattttttaagaaaakctgtaaaaaggatgaaagaaagtcgcctcgaagatacacaaaaggtaaaatgtggtggtagttataggaggatgtttagtttttcataattttttagataatatacatatgatcagtgcagttacctgtatgtttttaaagaatgcttttaacatgaagactgctcatgtttagagcaagagaattcatttggtagaaatgcagaaagtggggtttggggaaggagatatgagaatgagtcagagacagcacatgaaatttgatatcagacacaacaattagtatgccacggcataaattttattgagataaaactttaccactttacttcccttcaataaattgtcagaggataaacattactgtttggaaatatattttactgatattatgctttccccagatcataaattggtaaagactcatttcaagtacaaacctgttattttacacattctcaaatgaaagtccctatcaggccacctgctgaagtgtagcgtgtgttaaatttgagccatctcacatgatagccagatttgtttcaggaaaacatcctgctttccaaggatttagaagggtatgtttttcactggtgattcaggcaacatgcatcagatttctggtcttcaaggagccatattctcagaagggagatcaaggaccacgcttgtgatttacttctgacttcaggagccactttctgtcagtgaaatttctctttttgcttctagcaccgagtggatttccttcagctgatgattgactctcagaattcaaaagaaactgagtcccacaaaggtaaccagagtgtttctgagggctacttgtggggcactcagagggaaggccttgtyctgaaaatgtgcaggaagtattccaggatgatgagaatttctgccacatagcagaacgacacatgtttgaatgttataagtggtagttggaggcactttctagaggcatgcaggcatagatagccatgttctaagagtaaagggcaaccctaagcaaacctggcatgctagaaagtcagtctgcggtctgtggatcacctacatcagatcaaatgccaattctcagcctccttcagatccactgaataaaaatttctgcctagaaatttattaggttgctgcaaaattaattgtgggtttttccattacttttaattgcaaaaaaatgcaattaaaagtaatggcaaaaaccacaataacttttgcagctacctaatacatctaacatccaatcaggagccacgctgttccaaaaggggtgattttaactggcagtacttgttgaaagtgtgttcaccaggttaatctactgcaaagttattttccactttggaatggattagtaacttgtggggaaaacctctgagaccgtgtaaatatcctctttgtcttcaatgttycacctacgagttttacaacccatgtatgttttttactgaagtcactattactatgacagtggcaaaatgatgaccatggtcaattacaagccaccaagacttggcaaccatctcacaaaattcctgaatatttaactattggttctagagagcaggactgggcttactccagcatactgctttaaatatatccatgtctacatccacttttgtctgtatgtctatgtatctatctatgtatctatctagctatgtatctatctatctatctatcatctatctatctatcatctatccatctatcatctatcatttatccatctatcatctatctacttatatattatctatctatcatctaactattcatctatctatcccaatataacttgctgtgataaaggaaatagtctattgttttactgtttcatatagaaatcactagacacatatggctattgagcactggatatgtggctagtgccattgaagatcaattttaaatggtatttcagtttaatttaataaaatttgattttaaatagccactagtgggtagtggctaccatattggacagcagagctctaaactttgagattatagttcaatttcacatcagtatcatcaggttcatgataactgaatactatgattaggtagttgaatttacttataactgcatcacagaagtcttcactggtaaatcacagctctgtcgacctttctcacactcctttcatattggttttggttgtgaattacatggttggagcaggcattatatttatttctatgttccaggtctctaaaggtcctaatccagtcctgatcaaacagaccagtgatggaccatcctgagcttctctcaggagaraaatcaagaggggcccaacttgtaatcataggagcttatgctattttaatgccatccatcagactacaatcaattaccactcatctagctttttgtccatctctcattcttgtacatcctgagatagtcaattctgagaactgtagcctagatctatcacctgatgcctctcaaagatataatccgtgcttctcaagctaggctatgcacacaaatcactgcatcttgtgaaagttcagattttgaatcagtagttcaagggtggggtttgagattttgcatttctaatgagctctcagatgcttctgacccatggaccacactttgaataccaagaagtggtctgtagaccaatattggtcccttaagttccctcaaacatatcttcgggaaacgtcctttgattttccctacatttaaccattagtgttgcaaattctctcaaagtttgtcaagatatattgtagctaaaataaattacatttttcttgggggagagtactacctcatattaacttacaataaagtacttttaggatcattcaaggaacacacccataacactgagtatgttatgcggaaatgctctctctggaaattacacagctgtgcaggtggcgggggtggcatgaggaggagtggatggcccacattctcgaagaccttggggaaaactggattaaaatgatttgccttattctggttctgtaagatacacatcagaatgaaaccacccccagtgtacctctgaattgcttttctattcttttcccttagggatttgagggcttcacttagatttctcttcatctaaactgtgatgccctacattgatctgatttacctaaaatgtctttcctctcctttcagctctgtccgatcyggagctcgtggcccaatcaattatctttatttttgctggctatgaaaccacgagcagtgttctctccttcattatgtatgaactggccactcaccctgatgtccagcagaaactgcaggaggaaattgatgcagttttacccaataaggtgagtggatgrtacatggagaaggagggaggaggtgaaaccttagyaaaaatgcctcctcaccacttcccaggagaatttttataaaaascataatcactgattctttcactgactctatgtaggaaggctctgaaaagaaaaagaaagaaacatagcaaatggttgctactggcagaagcgtaagatctttgtaaaacgtgctggctctggttcatctgctttctattactacaataatgctaagtaaaaaacctccaaaaacctcagtggcatctaacaataagcatttgttgctcacactcatttcacattggttttggttgtgaattacatgtttgcagcaggcaccatagtggtgtgtgatgtccccttagctgtatccacatatggacacaggaattkgctctttttatctctttttattttcttggttacagacatgtgacttttttttttgaaaggtaacaatcactttctcatatgttatttgatgctagtggtcatagcctattagtcacatttgtttcaatgagaaagaaaaaccagtacacggttatgctaaggatttcagtccctggggtgagagccgtctcgaatgtctcccyacttcataactcctccacacatcatagttggatagtgagctctgctgatattggcaggacttgctctggtctggctgtagtctgacggagcctggccctgggtgtgctgtgcaggctgactcagctctccccacacctatctcatgttccagtcaggcagtaactggtgaagaagccaagctaggaaccaggatatctggctcctgagctaaagtcttaaaacactatcatattgccttccaaatataacaccaaatactaggtgcatatcacccwcactgttttcagacctctgccaaaattgggattctttgtggtatgaagagacacggctttggggctggcccggctgtgrcagtgaggtgaacacaaagggatgttcttcagagattacagtccagccctgaagcaacaactaggagactgwttsagcaagtgaggacagggctgtgtggggttctatcctctttataacttccactagcactgaaatcgtgttctctggttacatccaaccagarccttctttgtcatttttgggatagaaagggactagtttatcctcaaattatttatggagattttatataatatagtgtttctctccacattttctgtatataacaaaagtcctccttttagtgtgtgtatacacatatatatacacatatatatgtgtgtgtgtatgtgtgtgtgtatatatatatasacatatatacacggttatgctaaggatttcagtccctggggtgagagccttcccgaatgcttcccaccttcataactcctccacacatctcagtgggccactgagcacagcaatgggcatgacagttattaaaacactttataaatgcttcgatcctttaccagtatgagttagtctctggagctcctaatacttcattagtactgcatggactgagttaaaagttaattcaaaatctcaatttatccaaatctgtttcgttctttccaggcaccacccacctatgatactgtgctacagatggagtatcttgacatggtggtgaatgaaacgctcagattattcccaattgctatgagacttgagagggtctgcaaaaaagatgttgagatcaatgggatgttcattcccaaaggggtggtggtgatgattccaagctatgctcttcaccgtgacccaaagtactggacagagcctgagaagttcctccctgaaaggtacaaggcccctgggaagggagccctccctgaaccagcctggttcaagcatattctgcctctcttaatctacaggacagtcatgtggttgtataattatttgcttgtatttttatatttagagatttttttaatcatcaaattgattattgtcacactttacaaaccatagactagaaaaaagaaaactacagtcatccacaattccaacaacttacgatgaaggtcatcagttatgtccttatgggtcatcagtgtccaaaatgtaaggactcttttaaaaacacatgatcacaatgctattattatgtcccccaaatgaatatttttttcataaatataatcaaatatttaggaataacattttaataaaaaacatgcatctaatcttcaaagaattttatagcttactggaacagatagacaaagaaagcagkgatgatactgcattacatcggtacagtagcatcatatgcctgtgtaaattatctgacttcaactattctatggaggtgtgggggagaaagagggagagatggagagaagaagaaggaggagaaggagggagaagacaaggtaaggaggagaaggaggagaattagaaaaacaagagaggagatgagaaggaaagtgcaaaataacaattttgaaatagtacaagacaatttccccttctccttcctcatgaccaatgtaagtgtgacttgaggcaggaacctacttttccatcagtcagtcccatcacttatgtgccttttatagtgtggacacatcaccaccctgaatataatttcagtgtttagaaataagtattctttgcaacactatttatctcatctcaacaagactgaaagctcctatagtgtcaggagagtagaaaggatctgtagcttacaattctcatagcaaaataagcatagcaggatttcaatgaccagcccacaaaagtatcctgtgtactactagttgaggggtggcccctaagtaagaaaccctaacatgtaactcttaggggtattatgtcattaactttttaaaaatctaccaacgtggaaccagattcagcaagaagaacaaggacaacatagatccttacatatacacaccctttggaagtggacccagaaactgcattggcaygaggtttgctctcatgaacatgaaacttgctctaatcagagtccttcagaacttctccttcaaaycttgtaaagaaacacaggttagtcaattttctataaaaataatgttgtattaataattcttttaactgagtggtctgtattttttaaaaagaatatgcttgtttaatcttttactaatttgttctctgggccaaagaatcaattaggcccatctgtgatctttaagggtgcttcagttctggagttcaaaagctgtagcatcaaaaacatcatgtaaagcccatgtagattagcatggcataattatctgcagtctccttgaacttgagcaaagtttacattcagtttcaagtcgattggaaagatggggaagtattttgcacagtcatgaagtgtaatgattaccttgttgtgacttttgaatgctgctcttcccaaccagaacttggagaagctttctcatgagagtggctcccaaccactagctgtacattggaatcaccagggagctttaaaaattcatgatgtctgggatatcacagaaattctaaactaatttgcccagagtgtggctttaaaagcttccccattgcttctcatgtgaagccaaggttgagaatgactaatttaaggcatttctggtggatataaaggactaccacagtccaaggccatcctgactgacctcaccttccaggtgcctagctccatccagctgggctccttttcaacccaattataactctattaatgttgttcccagccaggcatggtggctcatgcctgtaatcccagcactttgggaggccgaagcaggcggatcatgaggtcaggagatcgagaccatcctggctaacacggtgaaaccccgtctctactaaaaatacaaaaaattaccctggagaggtggcaggcacctgtagtcccagctactctggaggctgaggcaggagaatggcatgaaccccagggagcggagcctgcagtgagccgagattgggccactgcactccagcctgggtgacagcgagactctgtctcaaaaaaaaaaaaatgttgttccctttctcctcattttgttcttatctttcaagtcctagttcaatccccaagcccctccaaagtgtcttctcctcctagtccagggcccatttacttctctgctctgttattggatactggaggctattatcataaatttgacaatttgccattaaatcattgagttttattctctatattttctttgtatctaaaatgtcttcccccctccattaacaatatcctctcattttattcctttttaaaatatcccagtggtgccttgcaagggactgtatctaatgcaagcatttggtaaatgtttaaggagtgatgtgcagttgatggcttgcatacatatattaagctatttaatgtgaacctttaaacaaatgccattcgtgcatatgcatgtgtgtgtgtgtgtgtgcacatgtgggcatgcatgtctgtctgcagtgaaaatatattcagggtttttgaaaatttttaaataataaggtattatatttatagaaagatttgaaatattttctctgaagaagttaaagaacagacgtcattgattcatattaaacaataccctataaatcttatttctaggtctcatgtatttattattcaattccaccccttaagtrggctttctatataggagaggaagaagacagaaatagtttccatattatttccatattccatattatttgtggctttaggccagcagtgtagctgtattatatgtgcccagacaggggactcagccctgaataaaagtggtcctctggcacacctgggatggggaaggtactccttggtaagctcccaacctggcacttcttgatctccctggcaattttcttgcccattactccatggagatcagaatatcactctgttgtgtcccctcaacacggaaggagtgtctcaataagaatggggctaaaagttgagtccaaacactgtaggaattgagaggttccccacttgcactacccttggaagccaagagaagatgttaaaaaataaaatggtaatgcttcctgaaggtgtcttcccatctttacactggatgggttcaattgggaggaattactggactctggaagttgaagactgtccatataattaaaatgtacaataactacccaggtttaccttgcaagtttcaacatacacaaaattaactttatatgactcttcaaaaacagtttgccatcatacctaataatctggtttaaattttaaaaactcatccattttacttaaaatttaaatcaaaaaagaacacaggtttccatgaatttgtctcaggcctggcacagaatagtactccataaatattttgttaaatgatagatgatgaatgctctcactgtccaatcttcacacatcttatagactaagtataaagaatccaagatttatagtgctgaaagtagtttttatatgtttacaaagcattattgtcattactgcattttttttgcccattactccatrgagatcagaatatcactctgttgtgtcccctcaacactgaaggagtgtctcactcactttgatgctatactttctacttttgtttatttaatgcttctcaatatrcttgtttaactgttgcagatccccctgaaattaagcttaggaggacttcttcaaccagaaaaacccgttgttctaaaggttgagtcaagggatggcaccgtaagtggagcctgaattttcctaaggacttctgctttgctcttcaagaaatctgtgcctgagaacaccagagacctcaaattactttgtgaatagaactctgaaatgaagatgggcttcatccaatggactgcataaataaccggggattctgtacatgcattgagctctctcattgtctgtgtagagtgttatacttgggaatataaaggaggtgaccaaatcagtgtgaggaggtagatttggctcctytgcttctcacgggactatttccaccacccccagttagcaccattaactcctcctgagctctgataagagaatcaacatttctcaataatttcctccacaaattattaatgaaaataagaattattttgatggctctaacaatgacatttatatcacatgttttctctggagtattctataagttttatgttaaatcaataaagaccactttacaaaagtattatcagatgctttcctgcacattaaggagaaatctatagaactgaatgagaaccaacaagtaaatatttttggtcattgtaatcactgttggcgtggggcctttgtcagaactagaatttgattattaacataggtgaaagttaatccactgtgactttgcccattgtttagaaagaatattcatagtttaattatgccttttttgatcaggcacagtggctcacgcctgtaatcctagcagtttgggaggctgagccgggtggatcgcctgaggtcaggagttcaagacaagcctggcctacatggttgaaaccccatctctactaaaaatacacaaattagctaggcatggtggactcgcctgtaatctcactacacaggaggctgaggcaggagaatcacttgaacctgggaggcggatgttgaagtgagctgagattgcaccactgcactccagtctgggtgagagtgagactcagtcttaaaaaaatatgcctttttgaagcacgtacattttgtaacaaagaactgaagctcttattatattattagttttgatttaatgttttcagcccatctcctttcatatttctgggagacagaaaacatgtttccctacacctcttgcattccatcctcaacacccaactgtctcgatgcaatgaacacttaataaaaaacagtcgattggtcaattgattgagcaataagcctaaaagcactcattccttttcttttccaaattcttcctttattttcccttcctgaataatttagtcctaaagccattaggtgggtggcagccagatggtggccacacattaaggtagagaagagagagtcatggtggctccaagtcagagaccaaggaggttcatgtggagagacatcctggcctgggtgtgggagtccaagcaagcagagaaggggtcgacgcagaggggtggcttgcaagagcagccagagcctaaatagggtatggagaacccacatgaggcgaggagggcatccatgagtgggaggggttgggtgaggtttggctacataaaggggattgatcaaataagtaaatgtattaaggatgatagaagccaggcttctcacctttgcagaagggagtcatggattcagaaagggagaaaactagcatgaatcctatgaaattagattggaatggatgtaaccgtgtatattcatacccttgtagatagatagatgggtagatagatgatagataggtaacagatagatgacagataatgagatagatagatgtaaatgtatgtctgtatttgtgtgtgtgtacaaaaaacatatattccctacttctctccactgatagggctaggtaacaatgacatttcaatagcaatgaacacacttagtgccccgatcttggcttatgaataccattttccactgaagggaaccagagctctttagagaaatggctgatgccagggcaagaattaagaatgttcaagataagtttaggacacattttgtgccaggaagcaagaaaattttcaaataatttccaagtaatctttggaaatgatacttgaaaatgacttccaaatgacatttccaaatgacttgcaaacgatttccaaatgatatttggaaaaacctaaagactccatcaaagaactattggaactgataaacacattcagtaaagttgcaggatacaaaatcagcatacaaaaatcagtagcatttctatatgccaatagtgaacaatctggcaaaaataaaaaagtaatcccatttacaatagccacaaataaaactaaatacctagaaattaacttaatcaaagaagagaaaggtctctacaatgaatactgtaaaacattgatgaaaggaattgaagacacaaaaaaggatatttcatgtttatatattgtgagaatcaacattgttaaaaatgtccacactactcaaagcaatgtacagattcaatgcaatccctcaaaataccaatgacattcttcaaataaatagaaaaaaatcccataatttgtatggaaccacaaaagacccataatagccaaagctatcttcagcaaaaagaacaaaactggaggaatcatgttacctgacttcaaattatactacagaggtacagtaaccaaaacagcatggttcttgtataaaaacagacacatagaccaatgaaatagaaaagagaacccagaaacaaatgcaaacacctacagtgaactcatttttgacactgctaccaagaacataccctggggaacagaacatctcttcaataaatggtgctgggaaagctggatatcaatatgcagaagaatgaaactagacacctatatctcaccagacacaaaaatcaaatcaaggtggattaaaggctgaaatctggctgagcagggtgactcatgactgtaatctcagtactttgcagaactttgagaggtcaaggtgggcagatcacttgaggtcaggagttcgagaccagcctggccaacatagtgaaaccccatctctaccaaaaaatacacaagttagctgggcatggtggtgcattcctgtagtcccagctagtccagaagctaaggtgggagaatcatttggacctgggaggtggaggctgcagtgggccgagatcattccaatgcacctcatcctgggcaacagagtgagacagactgaagtctaagacctcaagctatgaagctgctacaagaaaacattgtggaaactcttcaggacattggtctgggcaaaaatttctgaagtaataccccacaagcacaggcaaccaaagcaaaaatggacaaatggaatcacatcaagttaaaaagcttccgtgccgcaaaaaaagtaatcaacaaagtgaagacacaaaccacagaatgggagaaaatactttcaaactaacattctgacaacagattaatagccagaatatataaagagctcaaacaactctgtaggaaacaatctaataatccaatcaaaaaatgggcaaaagatttgaatagatatttctctctctcttttttttaattttgagacggagtctctctctgtcgcccaggctggagtgcagtggcactatctcggctcactgtaagctcctcctcctgggttcatgtcattctcctgcctcagcctcccgagtagctgggactacaggtgcccgccaccatgcctggctaatttttttgtatttttagtagagacggggtttcactgtgttagccaggatggtctcgatctcctgacctcgtgatccacccgccttggcctcccaaagtgctaggattacaggcgtgagccaccgcgcccggcctgaatagacatttctcaaaagaagacagacaaatgccacataggcatatgataaggtgctcaacatcattgatcattagagaaatgaaataaaaaactatagtgagatagcatctcaccccagctaaaatggcttttatccaaaagacaggcaataataaatgccagcaagaatgtggagaaaaggaaacccttgtacactgttggtgtaaattagtataaccactatagagaacagtttggaggttcctcaaaaaattaaaagaaagctaccataagatccagaaatcacagtgcttcggtatatacctgaaagaacggatatccgtatactgaagagatatcttcacgctcatgttcacaatagccactactcacaaatgctaagatgtggaagcaacctaagtgtccatcaacagatgaatggataaagaaagtgctccacttatacacaatggagtacaattcagatacgaaaaaagcatgagatcttgttatctgtaataacatggatggaactggaggtcatcatgttaagtgaaataagccaggcacagaaagacagacattgcatgttctcacttatttgcaggatctacaaatcaaaacaattgagctaatgtctgggtcttagtcaattttgtaccctaagtactgtgagcacagcttttaaaatacatgatgaatgctttaatacaggaatgaatagataagaggcacagggtgcctctgggtgttcttctgatacatagtatcttccttgacacattcagtacaactctcagcaggtaagtctcttcatgttatgttaccttctgaggaattaggtggcagaacatgccttctactattttcctttgcagaacaagaccagttgcattagttgggacacagtgctggctacatttgagtcccaagcaacgattagtctattgctgagagtaattagtctatttctacagacttagaggggatgacacacaggggcccagcaatctcacccaagtcaactctgccaacctttctggtcacccaccatgtgtacagtaccttgctagggtccagggtcatgaaagtaagtaataccagactgtgcccttgaggagctcacctctgctaagggaaacgggcacagaaacccacaatggtgctagagaggaaagaggacaataggactttgtgaggggataggaggcacccagaggaagcaatggttacatctgtgtgaggaggttggtaaggtaagactttaacagaaggggtctgtctgtctgggcttggaaggatgtgtaggagtcatcgagggggcacaggtacactccaggcagagggaattgcatgggtaaagatctgtaggtatggcttgtggggatggatttcaagtattctggaataaggacagccatggaaacaaggacaggtgagaggagatttaacagatttcatgccaacatggcacatgtatacatatgtaacaaacctgcacattttgcacatgtaccctaaaacttaaagtataataataataaaattaaaaaaaaatagagttcataccaatggccccacttcagtttctgataagaactcagattccttggactccctgataacactgattaagttgtttatgattcctcatagaacatgaactcaaaggaggtcatcaaaggggtgtgtgtgattctttgctactggctgcagctgcagccccgcctccttctccagcacataaacatttcagcagcttgtcctaagactgctgtgcagggcagggaagctccaggcagacagcccagcaaacagcagcacacagctgaaagtaagactcagagaagacagttgaggaaggaaagtggcaacggacctcatcccaaatttggcggtggaaacctggcttctccttgctgtcagcctggtgctccactatctgtcagtaactgtccagattcctctcctctgttaacttggacttggggtgctctcaggcccctgctcccttatctgttttgaagatcaaaagagatgttcaaggaggagtagattaattgttggatgctacaaacacataaaggttattattgatcttatgcagatttatgaataaataaataagcatttgtcccagctaccttctcattttggtaactaggagggtttagggacagcatttggtagtgggaatgatctgattaggttagatttgacctatactaatcaacaaaaacccagcaaaggcagattacaaactgctgaacacgatggggagtgtgatcctcatccccttcccaggttctcaggattctggggacaggagggagcagcttgggtttttgtctcattaccttcattttctgggttctctgtctgctggaagagatgtgtagaagtttgtcccctgtggacctggtggttcctgctcccccaacttccaccccaggatatcatttacataacgcaccggggaacaccaagacttcacgggaagctgtcccccggctcttccctctttcctgtgccatgtcccaaaacatcccctcccacctatgactcactcctccaccctgtcatacacagaactatttaccttgcaatgattaatctccagagcaaaggagacttggaggaagttttgaagatttattctttgctttaatctttttcctcccgtctctgggaggctagcattaatatagagctttgtttctcacctaatgggaatctgctagcagcctgaaaaggcaggagctgtgaaagccaatttggattttacacattttttcccctttgtgttacagtaaaggaggatgaaccctctcactggtgggattcctggcatcctagagcaggtggagagaagagttacttcccactgtgggtagtggaggctccacctgttccattaacttctacctcaatttgacttttattaagagcagggaaccacaatgacatgaaaatagacactataaaactaattttaattctttcacagaaagcttaggaattcagtgaatagtggcaacatagtttccattttctaacattttaaaataaattgatatggtttaaattcattcatttttaaaccagaattttttggagatagactatttccagcatgttccttctggatgataaaagagggctgttagttcagtatttgtgacaataaatgtgtgtaaaataacatcacctttccagaataatatcaggaatatgagtctaatacatgaatgtatatctctaagacaagactgcatatgtctttttaaatatacatgcctgacagtttattgtaatacctcctttttgaatatacctgcttagcaggctaccttaaactctcaggcaggggagtaagcaatactgt

SEQ ID NO: 93642 - DNA, 26013 bp, Homo sapiens
aaagtctaccaaatttctgataagttcagagattagagacaccacaggactcttttatctgtctgtgatgtttgcttttctgtacaattactgactacagttttactgcatcaggcataggtctctgtctctcagctttcttgtagcgtgctgccatcaggtggtaataggtgccataatcacttagttcaattataagatatggatagcaatgatgaatgtttttcctgatgtttgttaacactttacttataagcgaatttgaaaacccattgcccaaatacaccatagtgcactcccttatttcatgcaggtttctgctcaatatgtcaccctaacagcaaggccttcctgaactaccttgtattaactactctgcaacatttcctgtccctttacactgctccatttttaatcatccatcttttaaacacaattcttccttcctgaattcttatttttattcacctcttatttggctggatttcattatagtctttttttttaggaagggtccatgagtgttgtctccctggagttcttttcagtggtcaaaaacatctgcttgctgccttttacatgaataacatcttgactggcatatcatacaggaaaacagaatcccttctaagttttttaaacaaaaagatgacaagttattggaagacctaaagttgcaaacaggcagggtttattttacttgagatcaggagctgcagaacgttcatcaccactgaaggagcttagggtgctggctgccactgagaaggtcaggcttgtctgctgctaccacagttgccagagacagaaaagaaacagcttttacctttcctctacctcctaatctcacacaagtgcctcccacttgtaaaacctaatccagaactaaggtggcaagggaatccaaaaaatgtggttccttagcttctagcccctgcaatacaggtatgagcagagaagtaaagatatatatatatctttacttatatatatatatgtaatttgagaataagtttcagaaatgatgtccatttacacctaaatatttcagtgtgtgtttcctgaaaacaaggaattcctttatataacaccagtgaaatgatcaaaattgggaaattaatgctaatatccttctatctaatttgcagatcttattcagattttgtcaattgccctaataatgtttttttttttttctggtaaatctctctttttttttttttaagacagggtctcgttctgtcacccaggttggagtgcagtggcatgatcatggctcactacagtcttgacctccccggctcaagtgattctcctacctcagcctcctgaatagctagggacacaggcacccaccatcacacctagctaatgttttctttctaatttttttgtaaagggttctcattatgttgccagggtgttctcaaactcctggcctcaagcaattctcctgccttgacctcctaaaatgctgagtttataggcatgagccaccatggctggcctggaaatattttatatcttgatatgggtggttgtcatatgtgcatcatcacactgtgcacttaaaatgttatttatgttactttaagtaagctataccttaattaaaattttttacatggagaaaaaagatctagaggaaaacaattcccatagattaaaaataaaatgcaaaagttaaatttaacaatgtaaaaagcatccattgttctattatatttcaacaaaatctatacagaaggaaaataaaatatttaaaactaatcagaaatattagatttccatatttttctaccttcctgatcaatttaaatatcatgaaaatcatatcttccttgtaaatttgaaataaattgctccaacatcactctggacacaatgtcttcgtatctttgataatctttacagtgtctcctattatcattgttctgtttacatgtactgcttcatttttaattaattttggtgttttttcctataatattcattttaattagtttttttaaatgggaagagatggatttattgttctgtgtactgccttgattagattatcttttcttgattaagttttccagaggtgttttctttgcttgtttttgtcttggtcactttttctttctttctttctttctttttttctttttttttgagacagagtctagctctgttgcccaggctggagtatagtgtctgcaacctctgcctcccaagttcaagcgattcttctgcctcagcctcccgagtagctgggattacaggcactcaccaccacgcgcagctaattttttgtatttttagtagagacagggtttcaccatgttggccaggctggtctggaactcctgacctcaagtgatccgcctgcctcggcctcccaaagtgctgagcttacaggtgtgagccactccgcctagcccactcattctttatttaccagtttggtcatcttcctttctgaaagttttagaaatattcacctactttcatttagcttgcattctagttaggaaaactatttgtcaggaaaataaaaagtccttggccacttaaagaaaaaaaaaactgataattttagaaactcttagagggaggtcgtttttttgtttgtttgtttgttttgttttgtttttgtttgtttgttttgagacggagtctcgctctgtctttcccaggctggagtgcagtggcgtgatctcggctcactgcaacctctccctcctgggttcaagcaattctcctgcctcagcctccccaatagctgggaggaggagtagtagtaggcgtgcgccaccacgcccggctaatttttgtatttttagtagagacggggtttcaccctattggccaggctggtcttaaactcttgacctcatgatccgcccaccttggcctcccaaagtgctgggattacaggcgtgagccaccgcacccggcggagggagatagtttttaaatccttggtgggttttaaagttttatttaaaaataattattttggggtgtcaaaatttttttaaattctgattcactttcaggcaattgtctttgccttgagaagttcgtcctaaggaattcgccatttgcgcctgcttgctcgtttatcttagtttaattttatcaaactaaattcctactattggggattctatttactatcctaatttagaattttatcatccgtgagactgctaggactcaaggacctgtaaagataggtgaagacagaccaagcccaagaatcctcttttcttctctcttttttttttttttttttgagacagggtcttgctctgtcccccaggctggagtgcagtggtgcaatctccgctcactgcagcctctgtcttccaggttcaagcaattctcctgcctcagcctccccagtagctggtactacaggcatgtgccacaacgccctgctaatttttgtatttttggagagatacatgttggccaggctggtctcgaactcctggcctcaagtgatctgcaaggtacggagagcatcaggaaaaatagctaatgtatgctgggtttaatacctaggtgataggttgataggcgcagtaaatcatcatggcacacgtttacctgtgtaacaaatctgcataacctgcacatgtatcctggaatatatatatatatatatatatacacacacacacacaaacgagatatttatttatttatttattctttttgagacagggtctcactctgtagcccaggctggagtgcagcagcgcaatctcggctcactgcaacctccgcctcccgagttcaaacgattctcccgcctcagcctcccaagtagctgggattacaggcatgcgccaccacccccagctaagttctttatttttagtagagacagggtttcaccatgttggccaggctgctctcgaactcctggcttcaagagatccatccaccttggcctcccaaagtgctgggacaacaggtgggagtcaccgcggccaaaaaacgagatttttaaactaagaatccaatgaaacagaaacagacaatagaatcagctctgcagataagtaagatattgggcttagaagacaggcaacctaaaataacaatgattaatatatgagagaaagagaggaaaagatgaaggaaataaattaaaagataaagaatctctttaaactattggcttcactggaaaagaatccaatataaatcctaaaattgaaaaggactataatgttaaaacattaataaatgagtttgtacattggacatagaacaaaataggattagtaaactagaagagaggttattagaaactatccaaaataaaacactgataaaaatgagaactatggaatagaaataaaagataggtaaaataccatggaaaaattccaaaggagtaggaaaagacagaaaaaaaagcaacatttaagtagatactgaccaagaatattccaaaactgaaaaaagataccaagctatagattcagaaagcataaatgagtaaagttcaaaaaaaaaaccacctagatatattttattaaaatagctttaaggagtagggagagaaagtagagaaagagaaaacagtaaatagcaaagaaaaagacacattactggctgggcgcggtggctaacgcctgtaatcctagcacttcgggaagccgaggtgggcgtatcacttgaggtcaggagttcgaaaccagcttggccaccatggtgaaaccctgtctctactaaaaatgcaaaaaattagctgggcatggtggtgtgcacctgtaatcccagctacttgggaggctgaggcaggagaatcgcttgaactggggaggcggaggttgcagtgagccgagatcgtgccactgcctccagcctgggcaacagagtgagagaccgtctcaaaaaaacaaaacaaacaaacaaacaaacaaaaaacccacattactttcagtgaaaaaaaaccttaagtttataggtgacttctcagtagaagataatgcaagccagaagataatagaatgctatttttgaaatgctttgtaaaaaaaaaccacacacacacacacacacacacacacacacactgcttaactggtattcggtactcagtaaacacaccctttatgaattaaggtgaaacaaagacatctctttctttctttttcttttttttttttttagacggagtctcaccctgtcacccaggctggagtgcaatggcacgatctcagatcactgcaacctctgcctcctgggttcaagcgattctcctgccccagcctcccaagtagctgggattacaggtgtgcgccaccacgcccagctaattttttgtatctttagtagagacagggtttcaccatgttggccatgctggtctcaaactcctgacctcgtgagccgcccgcctctgcctcccaaagtgctgggattacaggtgtgagccagcacactggcttcttttcttttcttctctctctctttctcttttgtctcttttttttttttttagacggagtctcgctctgtcgcccaagctggagtgcaggggcgcgatctcaggtcactgcaacctccgtctcctgggtttgagggattctcctgcctcagcctctgaagtagctgtgattacagacgtgcgctactgcgcccagctaatttttgtatttttagtagagacagggtttcaccattttccccagagtggaaagaaatttttmaacaaacaaatatctagaaaaaaattaatctgtcgtcggcctacactaaacaaacaggaaaacttaaactgagctcttcagacagaagaaaaatgattccaaagagaaaaatggaaatccaggaagaaaagagtaaggatggaaagagtacatttgtggatgtatatacaaaaaaatattgactgcataaaacaataattaaaaaaaagaaaaaaggaaaaaaagaaaataagttccctgggatcccagaattaggtttgaccttcccggtccctctctcgcgagatctggaaaccggaagtgaattattttgcaggagtctacacccaggmggtggctatacttattaaagttggcgggagctgagcgatcagtcggtcctgggctggytgtggtgtagggcgttgcaggcagcgctcaccycctcaggccggcagaatgcgggtggctgtggctggctgctgccacggcgagctggataagatctatgagacgctggcgctggcagagcggcgcggcccggggcctgtcgacctcttgctgtgctgcggcgacttccaggcggtgcgcaacgaggcggatctacgctgcatggccgtgccgcccaagtatcgtcacatgcaaaccttctacaggtgaggacgcggccgggcccggacttggcggtgggggggtgggactgggttccctctgccactggctgcctgtttcccttagatcctgtctttgttctctctgtatctctaattggtgcctaactgaatacaggggtgaggtagtgggaggcgggaaatgtattcagttcggtactgtattcagttaggtaccaaattatgtcagtttcactagcaccctatctcattaggtgcttaggaaatgtcactttccttctttccatacacatcttatccatttcaaagggtgtcgaagcctgggaggggataacctggaggaagaagctgacaggtttagatagctaccttgtacttgataggactctggaattagttcattcaatgatcctgaagtttttactgggcccctgctatgtgcttgttgtggttctagaagatgaggttatggcaatgaactcgaaacagttcttgacttaattgaacgggcactgacttgaggctcaaggtggaagctcttcattcctaagggcaaggatggatactgggcaattccttttttttttttttttttttttcttgagacagagtttcgctttgttgcccaggctggagtgcagtaccgcgatattgacccactgcaacctccgtctcctgggttcaagcgattctcccacctcagcctcccgagtagctgggattacacccagctaatttttgcatttttagtagagacggggtttcaccacattggccaggttggtctcgaactcctgacctcaggggatccgcctgtgtcggccatcaaaagtgctgggattacaggagggagccaccgcgcccagccccaggcaattccttttgaaagagctttttaactttttatgatgaactcagtttctttttttttttcggaacttatttgcttttctgctatgcctaattgtggtaactgactttgctcttatgttctaggtattactctggagagaaaaaggctccagttctcacgctyttcattgggggaaaccatgaagcctcaaatcatttgcaagagttaccctatggtggctgggtggcaccaaacatttattatttaggtatgtgattgtgtttgtggatacttttttttcctgggatggaagagcttatcaggatttgcgttagttggactgtgtcttgacatgtatggtgtttggagaatgtcattaatttaaatacttaatcgtgaaaatttaattaagatagttaattattaaatggttgatcatgaaaatatgcccttcatctagtgttttaagcactagctaatataattgcaaagacctcacacactatttgtagtcccttcattttttcttacaatttttattgaattaaagaccttaaacttttattaatagaaattcttaagcatacacaaaagtagagaatagtatgatgaatctcagtacctgttaaccagcttcaacgactattatattgcaatctcctggatttttttttttttttttgtgggaagagatgactagagtatttaaagcaagtccaaccgttagattatttcacttatacatatttcagtacatgtttttaagtgataaggatctttaaaaatactactacagtactgttattatacttaactgaagtaatcattatctattgccatgttcgtggtcagatttccctgcttaatgtaaagatgtctgctttacaattggtttaaataggacccagacaaggccagcccatttcatttggttgtcatgactctgaagtctattagactaaaatagtctccctgtctcgctttttcatgccatttacttgctgaagaaaacaggaaatttgtcttgcagcatttcctgcattcaggatttagctgattggattccttttatcctttgcatttcctataatctgcttttagattttcagatttgattagattgtctcaatattggcccctataaactatatagccttttcatccctttatttttcgagacaaggtctggttctgttgcccaggctggagtgcagtggcctgatctcagctcattgcaaccttcgccttccaggctcaagccatcctcccaccacagcctcccaagtagctgtgactgcaagcgtgtaccaccacgcccggctaatttttttgtttttttgtatttttttgtggagactgagtttggccatgttgtccaggctggtctcgaactcatgagctcaaagtgatccgcccacctgggcctccaaagtggtgggattacagggatgagccaccgcacccagcttcatccctttatttaaatgtatattctttctagaacagtttatagattttaccaatgatgagatcatatttcagaaatttagtttccctactttgctacttactgatcatcttttgatgtattcatcctatattacaatattgtgaagaagtgaaattgtcagaagatgatcaatcagaaatgaaactagaagctgtaggttctttataccttatacctgttgattttcaggtttatacatgtaaatccatcataggacattttccacctcccactacctcacccgtgtattcagttaggtaccaaattatgtctgtttcactttcagtaccctatctcatttgtcccttccagaatctacttagtgttttggctcatctaattccagaccttrcctttatatactgttataatatatccctaatacactgttggcatattattatgtaaaaagcataacctcatcatggtgcttaattttcaaataattttagaactgtgtggaattccatctaaatggaatggtttattcagtcggtgtagagattccttttgcctacagtaattttatttaactgtattgtttaggtttggctggtgtggtaaaataccgaggtgtaaggatcggtggaatctctggtatctttaaatctcatgactatcgaaaaggtattgttttgagaattatttttaaactttagaacttgcatgccccagagtaagttaagcatgatatgtactttgactctttcatatatctttgtatcctcgatatagttttatcaagtcttagtattttgctttttttttttttttttttttttttgagacagagtttcgttcttggtgtccatgatggagtgcagtggtgcgatctcggctcactacaacctccacctcccaggttcaagccattctcctgcctcagcctcctgagtagctgggattacaggcgcccaccaccacgcccggctaatttttttgtatttttagtagagacggggtttcaccatgttggtcaggctagtctcgaatacctgacctcaagtgatcccacccacytctgcctcccaaagtgctgggattacaggcgtaagctaccacgcccggcctgtattttgctatttttttatttttatttttaagaaataaaacagtatagatacaattaaagttcattgtttatctgtcctcaatcccgttcccttcttttcttccctccctstctttgccaggcagtcactgtgttgaatttggtgattataatttacttgattattttacatcattaccacatatgtaagaactttaaacaatgtacttgttttaagcttcatataaatgtatcgtattgcttgtatctttctcaaacttgcttctttgtttaacatgctttgaagtctgtgttgatacatgtaatctaatctgttcatttgtgaatagtattccattatataagtatatcacaactgcatattaatttcattgtgtctgaatgaattatactttgatttcaaagttaaaggaatagcttggattcacatcgatttcacaaatttcatgaattacattgacagctaaaacttacatcctgaatgtaactgttacaagtctgttccctgccacttggctctttcttattctaaactgttggaatggaggtacaaaataggctgtcttctctgtggcaggtgtgggtacaaattggaaccacttttgggaagctgtttatcaggtttttctattttatctcagggatatcatttatgcatataatacacatatttctttttcggcttaaaacaacaataatttgttattttattaatattgggagcataaggaactagtctctagtcaacagttagaaagtaactgaagtgtgccagcaaccatgtgtgggaccttagaaagcagrtacacccttatttgagcctgcaaaggaaggagactgcagtccaccatctttttaaaaaatttccctagataactttttaaaatcgtatatattgaaggtgtacatgatattttggagacctgtgtatatgtctttgtatttgcagtatttaaggaaattaaatatagcttatttttctgcttcaatctaaggtcattttgagtgccccccttataattcatctacaatcaggagtatatatcatgtgagaaatattgaagtctataaattaaaacaggtacgtaaaaagcgcattacagcagacttgaaaacattttaaagtaattctgtgccaaaatgtattttggtcatattggtatactactttcaagaagagcaattctgtatttttaaaatgtggatcttgagtttttaggaggttcacagatgaaccttttttttttctttttttgagacagagtctcactatgtcacccaggctgaagtgcagtggcgcgatctcggctcactgcaacctccgcctcctgggttcaagcaagtcttgtgcctcaaccttctgagtagctggaactatgggcgcacaccaccacacctgcctaattttttgtatttgtagtagggatggggtttcaccatgtttgccaggctggtctcaaattcctgacctcaggtgatccgcctgccttggcctcccaaagtgctgggattataggtgtgagccactgtgcccggcaaaattttttttacttcaataattacgagtttattttagtaagaatgaargatttaattcatgatttcaaatattacttaggttaaggctaaagaatacctattaaagtgatatttaaaataaaatgttaaagtgatattttaaagaaaatattgaaataaacattttattttatgtaatagtaattaagtaatggtattaaatagaaaataagtaatagtaaagatgatagaggaaatgggaaaattgtgaaggtggtatggaaacactgcttaattgcagagtaggtgaaactaggttgtttgagaacccattacatggctgacactgggctaaacagacttcacacttggtatttcatataatctccactcaaaccctatgaaatagatgtaactcttaacttcatccctttaaggatgagaagccaaggctcagacaggtaagtaacctgcccaggacttcccaaagtttagtggtagagcctgcctgactgcactcatgcccatcacactgtctctagagcctctgcaggagtctaacaattcttgcaagtgtttcttttatgccctgtgcatacagttcccttaaatagattttctctttcacctatctaaatcctaccagtcctttaagacccaacttagatgccatttcccaaccatgagttttcttcttttttttttttgagacaaggtctcactctgtcacccaggctggagtgcagtagtatgatcatggcttgrctcactgcagcctcaatctgccaggcttgggtgatcctcccacttcagcctcccgaatagcttggactataggcatgcatcacctcgcccagctaatttttttcatattttttagagacagagtttcgccatgttgcccaggctggtctcaaactcttgaactcaagcgatccttctgccttggcctccgaaagtgctgggattacaggcatgagccaccatgcccagccagccatgacttctctagtttagagtcattaccctagtttgaatttttgttgcatctgttggccataccagttattcagtggttagtcatatctatctaatatctaatattttgtattgtcttgagcagttatttaagtttttttttttttttttgagacaaagtttcacttctgttgcccaagctggagtgcaacagtgcgatcttggctcactgcaacctctgcctcctgggttcaagcgattctcctgcctcagcctcctgagtagctgggattacaggcgcccaccaccacgcccggctaattttttgtattttaaataaagatggggtttcaccatgttggccaggctggtctcgaactcctgaccttcaggcgatccacccacctcggcctcctaaagtgctgggattacaggcgtgagccactgtgcccagccggtatttaagttgttttaatttcatttttcaagtattcgtttcagattacttgaaggttctggggataagtaaagtctggagtatattttgtttccttaagttgtttaatgaaatactaatttatgtagtaaacacagttttttagtgtatactatgtgagcctattagaattttttttttcctggtaaatctttgggtttactgaatcagtcatgttagaggtctcgtgaaatctagtgtctctggatcttcaaaacagtaatttcttttttcttttttttctttttgagatggagtttcactcttgtggcccaggctggagtgcaattgcatgatctcggcttattgcaacctccacctcctgggttcaagcgattctcctgcctcagtctccctagtagctgggattacagacagatgccacaacgtccagctaaatttttgtatttttagtagagatggggtttcaccatgttggtgaggctcgtttcgaactcctaacctcaggtgatccacctgcctcagcctcccaaagtgctgggattataggcgtgagccaccgcgcccggcccaaaataataatttctttaccaaagaggaaaagaactatggttatcgtgtattttagaagctaagtgctaaagatcttagatgactggcagtctaatcagagtctgtctccattgccttgccttgccactgaaaataagaatgatttatgagcagagaaaatgcagcttctctttgcctagatgaatgagttgcctagtatttttatcactctcttaaagtgtccttagaatgaattatacagaattctagagatctcagtgggtgaatggttgtatggtggtagagagaagggaggggattgttttggttaatctgttttaagagttttctttctttctctttttctcttttgaaagctgaagcagcctatagatatattcttgtctcatgattggccaagaagtatatatcattatggaaataagaagcaacttcttaagactaaatcttttttccgacaagaagtggaaaataacacattaggaagtccagctgcctcagagcttttagagcatctcaaacctacttattggttttctgcccaccttcatgtgaagtttgccgccttgatgcagcatcaggtagaaaacaaaatgtttattctttcatttaacacacactattgaacatctatggaccagacacagttgtaaagttagagaaagaagtaaaagataacttacctcttgtgagtagctcaatatatgattctgggaaagacaagcaattacaaaacagtataataagtttgagagaaaacgtaggcagtgggagcacctaagccagactgtggtgggatgggaacatgggagatgaagatagagaaggttttcaaaaggtgatagctgaactgagtcttgaagtgccaggaagaaacacattgtaagggtattttatttagagggactggcatgtgcagaggctcgaggtctgagagcatggggtgtttggggacttgtaggtagttcctgtgggactaaggcatagggactgatgaagcttgaacaagatcataactgccttctaggggccatgctctggagttatgattttaaccaaagatgatggggaaatttggggagtgatgaaatcagattttcatttcagaacgattagtttgacagcattgttgtgtatggattggagtaatgtaaaatgggaggcagagcaggctatttatgtaaaagaaaaggttttaacctaaggcaaagagagaatacagagaatgaagcagattctagagagattttagaaggagaatcattgcgatttggtgactgagggaggaaagaagtccaggatgacccccagttttctttgcttaactgcatggatgatgtacttgatggaaggtagaaaataaatatatacttataatgaaacttctatggaagtatgcatttcttcctttcacctctgattctggctgaactctgactttcccataaagtagtccataggaaaactgtgtagaaaatgctgggttaacagagttacagatttcttcttggagacatgtagagaatttctgagagtctttattgcactaatgggcattgcctttctcaagagtagaatgtgacgcttcccagacttacttaaccaaacacttctgtgttagaggtatactttaaaaatgttcctcaaacacggtttggaaggttttgtctgaaaatatacctatacgccctttctgttgtggatttattcttctcacttcccagtttcactgggagaaggagaggttactcttttcattgtatctctgcattaataatatgtttgacctctttgtaattgtctcctcaacttcctctgactgccactttctattttatcccctttaccaacaccagagatcacttttccttggactgctttgctgccaatatctgcctataatctccatgccttccatttttcttttttttttgagacagagtcttgctctgttgcccaggctggagtgcagtggcgcgatctccactcactgcaagctccaccttccgggttcacaccattctcctgcctcagtgtccagagtagctgggactacaggcgcccgccaccacgcctggctaattttttctatttttagtagagacggcgtttcactgtgttagccaggatggtctcgatctcctgatctcgtgatccacccgcctcggcctcccaaagtgctgggattacaggcatgagccaccgcgcctggccatgccttccatttttcttaatacagattgagcatctctaatctgaaatctgaaatgctctagaatctgaaatttttgacatgacacacaattttcagatttttggattaaggatattaaaccagtatgtattctgtaaatattccaaaatctgaaaaaatctgaaatttaaaacacttctagtcccaagcattttagataaggcatactcaacttgtacctcaccagaactgaactgttgcttggtcctcagcaggagataccatagtttgcttccttgtgttttttcctccatgatgaagctggaacaagatcacaactgccttttagaggccatgctctggagttcaggttttaactagagatgctggggaaagtttttttaaccttttccaaaatgacctacatgtttgtgattctttccacgtttctttctgtcaattcacttttgaaaaaaaaaaacctttattggagtataatttacatagcataaaattaatatgttttggcatggtggctcatgcctgtaatcccagcactttgggaggccaaggcgggtggatcacttgaggccaggagttcgaggccagtctggccaacatggcgaaactccatctctactaaaaatacaaaaattagctgggcatgttagcacatgcttgtaatcccagctattcgggaggctgagacatgagaatcacttgagcccgggaggcagaggttgccgtgagtcaagatcgtgccactgcactccaacctggacgacagagtaagactctgtctcaaaacaaagaaaagaaaagaaaaaaaccacattttaagtgaacaattcagtgatttttagtaaatttccagagttgtgctaatatcacatcatctagttttagaacttgtccatcacccccaaagatcctttgtgcctgcttgaaggcaatccttgttcctgccctcagccccaggggagcactaacttgctttgtgtttctatagatttgcctttcctgaacattcatttaaatggaatcgtaaaatatatagtctttggcaactgatttctttcgtttgcttgattttgagattcactcatgttgtagcatgtataaatattgcattcctttttactgctgagtaatagttcattctatggatatatcacatctatttttggtgttgtagctaagaaatctttgcctaacccagagttacaaagattttctcctgtgggttcttctaaaaattgtatagtttaagttctgccagtttacttttaagctcttttgtttatctttaatccttgggttatatgctttgatttatgtgtgttcaatgctttgagttaacrtcatcatcatcattagtttttgccttgaattttgtatggaaattgaaggtctgagaagttaaatgccttctcttttatcacacaagtgggtatagaattaacttaattttggaaaagtaacagtcattcctttgacacacaacttaggggtatgtgtgataaagattattttcatcctattccgtgtatgaagaatyacctgtggttgttttaacattctttcttaaatcatgattcatattgtccaggcaaaggataaaggacagacagccagagcaaccaaatttttagccttggacaaatgcttaccacatagagattttcttcaggtaagaagagtgaagtggctttataatatagttgtactcttccagagacttaaaaaaatataattttcctttcggaatttttttgttctgtttgtaatttatgtattctgagaattctttgggggtatcttacttattaatttaaaattaaatggattgatttaaaattaaataattgaaattaaatttaaattaaattcctttttattttattaaattatattaaagtgattagactgttamaaatatatatgtatttcttaacattgatttcatcctgtagatattagagatagaacatgaccccagtgctcctgattacttggaatatgatattgaatggctcactattctcagggctacggatgatcttattaatgtgactgggcgcctgtggaatatgccagaaaataatggcctgcatgcaaggtaagtcagactttatttaggacctgctttttccattgcatgcataatttttatatctcccacctttgttttgttttgttttgaaacagggtctagctctgttatccaaactggactgcagtggtgtgatcttggatcttggctcactgcatcctctgcctcctgggctaaagggatcctcccacctctgcccccagagtagctgggaccacaggcatgcaccaccatgcccagctaattttttggtatttttggtagagatggggctttcccatgttgcctaggttggtcttgaactcctgagctcaagctatccacctccctcggcctcccaaagtactgggattacaggcgtgagctgctgtatctggcctccacctttgtttttaatcaagggaattattgttgaatgartgtcagaacaattcaaagtttgcaggttttccatctaaaagagacaggaaaatggactgttgagcattacctcaaataaatttataagtgaataagtgtacataaaaccatgatatggtgaagatatagtccacacattaaaattgttttggagtatgagttaaagatggctttttctaagaattatttttttttctaaatggtcctttgctaaattaactctaactttaaaaatggaattttgatagatggcttattttttatccttgcacctgaagtctgtaattagatttcatcatttattgtttagagctgataaaatgtaaaaagctattgttttgtacttttataggtgggattatagtgcaacagaagaaggtatgaaagaagtattggaaaaattgaatcatgatctcaaggttccatgtaactttagtgtaacagctgcttgttatgatcctagcaagccacagacacaaatgcagctgattcataggatcaatcctcagacwactgaattttgtgcccaacttggcatcatagacatcaatgttaggcttcagaagtccaaggaagaacatcatgtgtgtggtgaatatgaagaacaggatgatgtggagagtaatgactctggagaagaccagagtgaatataatacagacacatctgctctgtcttctattaatccagatsaaataatgttagatgaagaagaagatgaagatagtattgtaagtgcacatagtgrcatgaatacaccatcggtagaaccttctgatcaagcttctgagttttctgcaagtttctctgatgtcaggatcttgccaggctctatgattgtatcttctgatgatacggtggattccacaattgatagagaggggaaacctggtgggactgtggartcagggaatggagaggacttaaccaaggtgccattgaagaggctgagtgatgaacatgaacctgaacaaagaaagaaaattaagaggaggaatcaagccatttacgctgcagtggatgatgatgatgaygatgcagcttaagatgatttacttgttttgtttttgtgtttgttttgtttttttgagatggagtttcactcttgtcacctagactggagtgcaatggcgtgatctcggctcaccgcaacctccgcctcccaggttcaagcaattctcctgcctcagcctcccaagtaggtgggactacaggtgcccgccaccacacccggctaatttttgcatttttagtaatgacagggtttcaccrtgttggccaggctggtctccaactcctgacctcaggcgatccacctgtcttggccttctaaagtgctgggattacaggcgtgagccactgtgcctggccgacaatttacttgtcttagtattatatgtagatatgtgattttttgagactgtatttttagagctgaatttttgactaaagacttaactttataataatgaagatacattagagaattttagttagatattgactttatctttaggcttttgtatgtttcagatgcaaacatattaaagtttcatatatttacttgactgggtatctttttttttgaagacatacattattcacttccatttttacaataaacacttacttaacatctactctgtgccaagcactctgctataatatgggaccataaagatgagtaagacaaggatttttgcctccaaggacttgttatcactgtaaacattttgatgtatacaatatggctatattatattttgttttataaaatcaagtcwttgtatatattatgatgtatgctttcttttcatttattataaatatttttcctgatcagcttttaatatctgtcaaataaaaattgaaattgaagatggtatataagatttcaggaaataaactactctgaatactaaacattggtaaacgtacaatcttaatttgctgagattagtataaccctgctgacttttgcatattgagttttttttgttttttttttttgagatgcaatctcactctgtcgttcaggagtgcagtggggagatatcggctcactacaagctccgcctcctgggttcacgccattctcctgcctcagcctcctgagtagctgggactacaggctcccgcaaccatgcctggctaattgtttgtattttgtttagtagagacggggtttcaccgtgttagccaggatggtctctatctcctgacctcgtgatctgcccgcctcggcctcccaaagtgctgggattacaggcgtgagccactgtgcccggccagcatattgtgttttaactttagctttaattttcatgtaactatagtaactatgtaggtcatttttggcatagttcaccccatagttttaattactagcaaggatcaagctgcacaaataactgcccctcatgctgcgtgatggattgctaaattaaagtatttttgaagatccatatagaaaaactacacctctgtgctatctctggttaaaatacctgggccacctgaagagattgtcactccgtacttcatatcagaagtcgtggaatccaagattgttccaggatctcatcatcccatggcagtctaaatccaggagttaatctaggagaataataatgtagcacttggcttctaccttgtcaacatttgacttaataacggtctaggatttgggggattttatttttatttccttccattttttggtttactttcttttttgagttgaataattcactcattttacttttttttttttttttttttttttttgagacaaagtctcactctgtcacccaggtgggagtgcagtggcacaatcttggctcattactgcaacctccacctcccaggttcaaggcaattctggtatttcaaggggaatctcatgcctcagcctcccaagtagctgggactacaggcgcctgccaccatgtccagctaatttttttttttttcaggcagagttttgctcttgttgcccaggctggagtgcaatggcatcatctcagctcaccacaacttccgcctcccgggttcaagcaattctcctgccttagcctcccgagtaggtgggattacaggcatgtgccaccacgtctggctaattttttgtatttttagtagagatgtggtttctccatgttggtcaggctggtctcgaactcctgacctgaggtgatccgcccacctcggcctcccaaagtgctgggattaaaggcttgagccaccacacccggcctaatttttgtatttttagttgaaatagggttttgccatgttggccaggctggtctcgaactcctggcttcaggtgatccacctgccttggcctcccaaagtgctgggaccacagccatgaaccacctcgcctggcccacttatttaatttaattaatttatttatttgagatagtctcattctgtcactcaggctggagtgcagtggcatgatctcggctcactgcaacctccgcctcctgagttcaagcgattctcctgcctcagcctcccaagtagctgggactacaggcccatgccaccacacccggctaatttgtgtatttttagtagagacagggtttcaccatgttggccaggatggtctcaatctcttgacctcgtgatccgcccacctcggcctctcaaagtgctgggattacaagcgtgagccacggtcccggcttgctttatttatttatttattttattttatttttattttttttgagatggagttttgctctgttgcccaggctggagtgcagtggcgtgatctcagctcactgcaagctccgcctcccgggttcacgccattctcctgcctcagcctcccgagtagctggaactacaggcacccaccaccatgcccggctaatttttttgtatttttagtagagacggggtttcaccgtgttagccaggatggtctcgatctcctgacctcgtgatccgcctgcctcggccttccaaagtgctgggattacaggcatgagccactgcgccccgcccttatttatttatttttgagacagagtctcgctctgtcccccaggctggagtgcagtggtgcgatctcagttcactgcaacctctgccccctggcttcaagcgattctcctgcctcagcctcctgaatagctggaactacaggtgtccgccaccaygaccagctaatttttgaatttttagtagaaatagggtttcatcatgttggccaggctggtctcaaaactcctggcttcaaacgatccacccgctttggcctctcaaagtgctgggattacaggcctgagccaccacgcccagcccggcccacttatttttattctcattatttacataaagtatttaaagctatgaccaggcacaatggctcatgcctgtaatcccaacattttgagaggctgagacaagaggattgcttgagctcaggagttcgagaccagcctgggctgaagtgagacctcgtctctacaaattaataaaaaaaaattagctgggtgtggtttcacatgcctgtggtcccagatacttgagcagctgagaagggaggattgcttgagactaggaggttgaggctgtagggagctgtgatcttgcaactgcactcagcctgggcgacagagtgagactgtctcaaaagaaagaaagaaaaagctatgaattgcccccgattgctgatttaattgaattgtaaaaattctgccatttattgtttttttcccagaaatttttattaaagaaaaaagcagaaacaaatattagagttaataaatgatgtttctcaaaaaaacctagataatcctctagcttacctaatcaagaaataaagcacagatatagaaaggaagaaagaaagaaaagaaaagaaagagagagagggcacaaatatagaaaggaaggaaggaagaaaaaaagaaagaaaagaaggaaggaaggaaaaggaaagaagaaggaaaggaagggaagggaggggaggggagggagagagagagaaagaaaggaaagaaaggaaggaaagaaagaaagaaagagaaagaaagaaagaaaaaaaaagaaaagcaagaaagattgccatactaaagaacctcctgacccagatggtttcaggaggaaactacccaaagcccagataatttctggccgggcgcggtggctcacgcctgtaaccccaacacccgaggtgggtgtatcacctgaggccaggatttcgagaccagcctgaccaacgtggagaaacccccatctctactaaaaatacagtattagccaggcatggtggcgcatgcctataattccagctactcgggaggctgaggcaggagaatcgcttgaacctgggagacggagcttgtggcgagctgagatcatgccattgcactccagcctgggcaacaagagcaaaactccgtctcaaaaaaaaaaaaaaaaaagaaggccagataatttataatgttagataaattgttttaaaatatataaaattaaataaaatttacagtttctttttatgaaagtatcacattgaagtctaaatctgaaaaaaattacacaaaaaaccctgtaaatctcacatatacatattgatgcaaaaatcctaaataaaatattagaaagcaacctatagcacactttaaaatgatatggcatgactgataaaaaaagatggttcaatattaggaagtctgtttatataatccacacattaatatacctaaggccaaacatcatgattatcatcatgggtgatgaaaaggtctttgacaaaattcaacacccatttctgattttgtaaaaaaaataagtagcatcttacttaatggggaagcactaagtattcccatcaaagcaaaggaacaaaacaggatacccactacctccattacgttttaacattgtattggaaagaacaaaacaatcacaaaagagaacacaatgaggggaatcagaattgcaaaagaagaggcatccatatacaggtgatctcatagtttaggtggaaaacaagaaaattacaattaggccaggcacggtggctcacgcctgtaatcccagcactttgcgaggccgaggtgagcggatcacgaggtcatgagatggagaccatcctggctaacatggtgaaaccccgtctctactaaaaatacaataaattagctgggtgtggtggggcggtgcctgtaatcccagctacttgggaggctgacgaaggagaatggtgtgaacccaggaggcagaggttgcattgagccgagattgcgccactgcactccagcctgggcgacagagcaagactctgtctcaaaaaaaaaaaaaaaaaaaaaaattacgattaaaagtaattcaaacaatcctatacctcagtaaagtgataagataaaattaacatagaaatcagtttacacacaattaccagtgacataacaccaacaagaatacttaagaagtaggcaaaacatataatgaggaaaaccataaaatatacctgaaaaatacaaaagtagactttatggtaaaatatctcttattcttggatagatagacaattttaaacatatcaattcttctcaagttatacaaatttaaaatgatcctagtcatgataccagtagttttttttgttttgtttgtttttctaaagctagacaagttgattttaaagtttacttggagaaataaggacaggaaaatttccaaaaaagggcaatggagggatactgggcatattatatattaaaacatactataaaacctgtatgggccgggtgcggtgactcacgcctgtaatcccagcagtttgggaggctgaagtgggaggatcacttgaggccaggagttcgagaccagcatggccaatatggcaaaaccccatctctacaaaaagtacaaaaattagcgtgtggtggagcacacctgtagtcccagctacttgggaggctgaggtggcaggatcgcttgagcccaggaggtggaggttgcagtaagctgagatcacactactgaactccagcctgggcgacagagcaaaactgactaaagaaaaaaaaaatcctgtgtaattaaaacaatgtagtactgtgtagtattggtgcattggagagatcaatggaccagaaagactggaaataggcccaaacatatataaagttttagtattaagtggcatctcaaattactgaggaaaaagaatgtttttgtttgttttttcagagacagaatattgctctgttacccaggagtgcaggtgatcatagctcactgcagcctcaaatccctaagctcaagcagtcctcccacctcagcctcctgagtagctaagactacaggcatgtaccaccactcttgtctaatttttaaaactttttctgtagaggtgggtttcattatgttgcccacgttgatcttgattcctggcctcaagcaatcttcccatcttggcctcccaaagtactgggattacaggcatgagccactgcacctgctaagatgatgtttttaataaatagagttggatatatggatatttatttggaaagaaacttgggtttatactttatataccataataaactccaaaaagatcagagatctacatgtgaaaaatgaaatcctataataccagatgaaaacacaggtaaatttccttataacatggaacggaggaaagcctttgtaactgtatcttaaaatgcaaacacaggaaaagactgatacattttgactatatataaaagtagataacttttgcatggcaaagaaaacataccataaacaaagttaaaaggtaaatgacaaactggtgatacatacttgcaactcatcaccaacaaagttcttatcttcccaaaatataaactatatagacccagtaatcccagttctaggaatatgacctaatgatatatgtccccaaattaaaaaaagcataagcacaaggttattcatcatagcattatttgtagtagcataagattggaaat

SEQ ID NO: 93643 - DNA, 42174 bp, Homo sapiens
agatcgatattgtttgtggcttaagaatgcctttaagtggttttccgccctgggcgggctaggtgttccttgccctcattccggtaaacccacaaccttccagcatgggcgttatggccatcatgaacatgtcccagtgctgcagagattttgtttatggccagttttggggccagtttatgaccagattttggggggcttgttcccaacaagtgataatctactaattaatgtatctgaaatagtttccatcccttttccatctcctagttactagtgcttccttgcatcattcatcaaataaacttcttacattcaaattcttgtttctggttatgcttctagagaatctaactaaagcagtggacagttagacatgggataaagagaggagttgagaatggctacaaaatctttcatataggctttttagaggtgttattaacattaatcataatgaaaaaagtatgtattttatattaagatgttagataactgaaactgagataactgttagacatattcagcagacagttgaaaatatgcaattgagaccaggtgcagtggcttacatctgtaatcctaccacattgggaggacaaggtgaaaggattgcttgagctcaggagttcaagaccaacctaggcaacatagtgcgaccttgtctctaccaaaataaatttaaaaatttgctgggtgtggcgtgtacacttctagtcccagctacatgggaggctgaatcaggaggactacttgaacccaggaggttgacgctgcagggagctgaggtcattccactgcactccagattggaaaacagagtgagaccatgtcataaacaaaaacaaaaaaaagaagaagaaaagaaaaagagagaaaacatgcaattggacatcaggagagaagtaaagactgaagataagggctaggtgcagtgcctcatgcctgtaatcccagcactttgggaaacggaggcaggaagatcgcttgaggccaggagtttgagagcagcctggacaacaaaacgagaccctgtttctacaaaacaaaaaaaacaaaaaaaaaacaaattctagaaagactggagataaggatttagaagttattagtgttattagtgtatataggcaggtgccaaagccatggaaatggataagatggccaaaatgcaaatgtacgatgaaaagaccagaaagttaaggataggttttttctgagacagagtcttgctctgttgcccaggccggagtgcagtggtgcaatctcggctcactgcagcctctgcctcccgggttccagcaattctcctgtctcagcctcttaggtagctgggatttcaggcacacgccaccacgcccagctaatttttgtatttttagtaaagatggggttttgccatgttggccaaactggtctcgaactcctgacctcaggtgatgcacccacctcagcctcctaaagtgctgggattacaggtgtgagccaccgcacccggccaaggataggtttttatgaaacattaacatttaagaggttagatgaagaagaaccaatgaaggagactgaaaaggatagaatccccatttggctctgtccttggatggaacacttaattgtgggcactttgttgattatttaaatttctagtccatttgcattatgaaggtacattttcttctaagacttactgagtctgttacactggctcaacaaggaattaagatatagtttgatatgaggaggaaagggcttgagaaaggaactgatgttggttaaatgcttaccatgggctagaccttgtacatatatcatctactgaataattacaacaacctgtcgtgtgggagctagcaccttgtgttacctttaaagaaagtgaagattagaaaagttaagaaatgtttacaagtttccacatttatttattacattgaggagcaagaattcataaaccttttcaactccaaaactcatgctcttgtcattatattatcaactgtaccaaaaaactcgatgaaatgtagcctattgtatttaatatttcctttttcttaaaccagcaaaagaagtgttttgaaaaaccatgcttttcaaatattttgattgcctgacttattgcatgtataatgaataactcatctccattaacccacttaaattaaggggtttaatgaaccccttaaactgccagttagaacttctgattcatttaaggtaaccactgttaagaattaaaataagtgggctgggtgcggtggctcacacctgtaatcccagcactttcggaggccgaggcgggtggatcacgaggtcaggagatggagaccatcctggccaacatggtgaaaccctgtctctactaaaatacaaaaattagccaggcgtggtggcgggcacctgtaatcccagctacttgggaggctgaggcaggtgaatcacttgaacctgggaggcagaggttgcagtgagctgagatcgagccactgcactccagcttggtgacagagcaaggttccgtcaaaaaataaaataaaataaaataagtgagagacaatataaatctttaaaatatgctttgtctttgacctagcaattccacttctgggaatttactgcaaggaagtgataaagaatgtgtgcaaagacttagtgataagctaatcacgatattgaaaaattggtaatggcttacatatctaataataaaatatagttgaataaattagggtatgtcccaaaatactcagtagtcattagaagtaggctaatattgagaggtgacagcgtgctggcagcccttgcagccctggctccctctcggcgccccctcggccttggtgcccactctggccacgcttgaggagcccttcagcctgctgctgcactgtgggagtccctttctgggctggccaaggctggagccggctccctctgcttgcggggaggtgtggagggagaggcgcgggtgggaactggggcttcgtgcagcgcttgcgggccagctagagttccgggtgggcgtgggcttggtgggccctgcactcgcagcggctggccggccccacttgccccgggcagtgaggggcttagcacccaggccagcagctgcagagggtgcgccaggtcccccagcagtgctggcccactggcgcccaagggctgaggagtgcgggcacacagcgggactggcgggcagctccgcctgccgccccagcgcaggatccactgggtgaagccagctgggctcctgagtctagtggggacttggagaacctttgtgtctagctaagggattgtgagtgcaccaatcagcactctgtgtcttgctcaaggcttgtgaacacaccaatcagcaccctgtgtctagctcagggtttgtggatgcaccaattggcactctgtatctagctaatgtggcggggacttggggaatctttatgtctagctaagggattgtgaatacaccaatcggcactctgtatctagctcaaggtttgtaaacacaccaatcagcaccctgtgtgtagctcagggtttgtggatgcaccaatcggcactctttatctagctaatctggtggggacttggagaatctttatgtctagctaagggattgtgaatgcaccaatcggcactctgtgtctagctcaaggtttgtaaatgcaccaatcagcactctgtgtctagctcagagtttgaaaatacaccaatcgacactctgtatctagctaatctagcggggacttggagaacttttgtgtctagctcagccattgtaaacgcaccaatcagcaccctgtcaaaatggaccaatcagctctctgtaaaacagaccaatcagctctctgtaaaatggaccaatcagcagaatgtgggtggggccagataataaaagcaggctgcctgagccagcagtggcaacccgcttgggtcccgttccacagcgtggaagctttgttctttcactctttgcaataaatcttgctgctgctcactctttgggtccacactgcctttatgagctgtaacacagcgaaggtttgcagcttcactcctgaagccagtgagaccacaaacccaccaggaggaatgaacaactccagacgcgctgccttaagagctgtaacgctcaccgcaaaggtctgcagcttcactcctgatctagcgagaccacgaacccaccagaaggaagaaagtccgaacacatccaaacgtcagaaggaacaaactccggacacgccgcctttaagaactgtaacactcactgcgagggtccgcagcttcattcttgaagtcagtgagaccaagaacccaccaattctggacacaatatgaatatggaaagttgctcatgagatagttttaagtgaaaaaaatcaagttagcaaaataagtgtggtccaatttctggttatattccttagctggaatataaacactgctagtgtgggctgtccattgttgacatcgctccctccacctcccgtgtgttcgcattaatttatatgcgttgtggcttttgttctagctgagaggagaagaggtatagttggtacaagagatgaggaggaatgtggagaaatatggtgagtgcagtaaggaatctatttcctgcctcacttctcatactgggttgagcccctaggctttgtgaatgacagctggaaaggatggaagtgtttcattttttaaaaataaaaatatgatattgtaattttggacaaaggagtagggaacaaagcccaagaaagttcaggaaagaattgtgagattttgtgcatatggagcagtaactcctagaccagatgtcaaagactgccatgaagctggagaggagacaattctccccatctgtgtggtggaggctgctcaatgtcccccaatttctcttcatctcatcttgcttattaatacaatttcagttaggcactcagctgacaggactatgtttcacagatccccttgcagctaggtgtggctttgtaatcagatggaatgaggggatatgattgtagaaactggagcagccatcttgaatgaaagatgcaaggcaagctctgatgatggcagagtcacgagataaaaggagcctgggaccctgtcacaggacagagctgccagcaataccgtctctataacaaacactaaatttaattattcatatctaaatctgaacataggcagtaatttctaaccagtgtttagcccagcacaaggcctgggtggtagacttccaataaatgtagaattaagtttattcacactatatagacttattgcaaggcaagaatgagaccttagactttcgtgctcaatcttgaagacaatgtttttcaacccttttcaacagattctctctcaaaacctaaaatctcatccaccatcccactctctttttaccagggagatgtgtttctcaactaaagaaatagaagaaagtgtgttctctacgtattgtcagttagctaattagagcagaatgctggtgatgccaaaatctgtagccccatcccttatatggcatttgagaggagcgagtataaagcagtagataataccaaaggttttggcctcagggccgcagttatctctcctttgtgagaccttgggggcactgtttaacctctctgggtctcatccaagaaatggaaatactaataatactccatatggttgttgcaaggatgaaatgagatgtctgtaggaagtgccgaggaatgcctagcacaaccaagagcttgttgaacttgtcacgctttactgtcgataatgtgcattaagcaaacgctagttttatttgtttatttcatcttctaagtataagaatacattgtagctcgacattttggcaccagcccctaaagcattcccaccaccacccccgctgcgacaaagccctgcgctccttacgacagcgtacgacgccgagcctgacaggaacgcctcgtgcggtagaaccgcgcgggccaatcgcgctgctcccgggtgatgacgtaggctgcgcctgtgcatgcgcagggaggggagaccttggcggagcggcggaggcgcccagcggaggtgaaagtattggcggaaaggaaaatacagcggaaaaatgcagagctggagtcgtgtgtactgctccttggccaaggtgagggccgagtaggtgaggtcgtgttgagccagaggcacggaaggtcccgctcagtgggtccggtacgcggcttaaccgtgttgggctggcggaggccgggcgcctgggccgcaccacccctggccccgcctctgcactggctcagcccggccctgggctccgaggtggccgctcatcctgcagcaggcgagggacgrggctgggcccaggctgtggcgagtcctttcgggttgtgtgacggccggcggtcacacatgccacacccccaagcctgggccgagggccatcccggtcacacataggcctctaccttggaggaagtgtaagccacccatgtcccgtatagtctggctytttataccatttgcctttttctcatcctaattctgatccctgagtggcctaagtttatgcagtgggcaggtaaccctggggtcacttcttgaatggtttagatccagtcagctccaacagatagccctcggaattcccctaaggtcttgtcagtgttggcagctttcaactggtgttcattgccatctctcacgacttcctggaggcttaaatctttaattgcagcaggttatcagaacaactctcctttttaatctgcttaccagatacagccaaattgtgtgtatgtggcaccgtggctgggtactatgttagtggagaccttaaaaataatatagcgatcaaacccttttgtttcagagatgaggaacctgagttctcaaaagttaatgtaacattctgcaagtcatgcttttagggagcggcggaggtgggactgaaactcaggattgtcaatctgctgctttttgggtttgctgtcctgacctcaaatgttaagagttgccttggaataggaaacatcagtgtaggttttgtcactgccgcccattttcctgctgtgagcaggggttatttgcttgcttgctttctgcctcattgcccttaggaaatggtagccgtccacatatagagattagggagattatgatgcaatttgtcaaactgtagtagcaccagaacgtaagtacattacttggtgcattttcctaagttaccttgtctaatttgctattcctagttgatgtctcaggaacatcttcatagattgttctaagtaaatacggactgtatatacacgctagcttagagttaggaaacaaaaattacaggtaaaaagattatcatgtatagattattcaagtatttaagttagaactttcagagcwttatttatttatttatttatttatttattttgagacggagtctcactctgacatccaggctagagtgcaatggcactatctcagctgactgcaacttccgcctcccgggttcaagtgattctcctgcctyggcctcccgagtagctgggattacaggcacccaccactacacccggctaattttcttgtatttttagtagagtcggggcttcactatgttggccaggctggtctcgaactcctgacctcaggtgatccgcccacctcagcctcccaaagtgttggcattacaggcgtgagccaccacggccggctcagagctttatgacattaaaatgatccctggcactaataattagccatgttttctgaaaattgaataaaaataccattgaatacgtttttaaaattaagttaaatatgagatgatttgttgactattgataataaaaagatgggtgtggcaagctgaggctgaaaaatttaaatgattagttattgtcaaagaggggatattgatctgtagcttctgtgtggcaatggaagaagatacactaataatcctcgcttgatacgtttgcccaaaattgttctgttatcatcaaccttcagtagttctatgttttgaattcatatcttacataatagggacattttctttttctagagaggccatttcaatcgaatatctcatggcctacagggactttctgcagtgcctctgagaacttacgcagatcagccgagtaagtacttaagtaaaacatttttttcatcacattagctgacagttcctttctatttcaatgtaaaagcaagtgaatattggaataacttatgttaagtgtcttatagttcatttgttcatgtatttattcgtttgaatgtatattgagctagtgtgttccaggcggtgaacaaggtaaaaaaaccctgctcttatgaaacttgtaatttggtgataaaagacaaacaatatataagtaatggataaatattttgggaagtaactgaaaattaaagcaggtaatagggaggaagagagataattttagatacagtgtcaggaaaggcctttctgaggagatgatgtctgggcagggtcctgagtgaagtgggggagtgaggttacttcaggcagagggaaacaacacygagaaaggcctgaggtgggacttagcttgtgaagtttaaggagtaataagaaggctggtatgactggagcagaaacccatgcaatgtaaagtcggagaggtaggcaggagacagatcatggagtgccttgtaaggcaggtctagtagtttggattatactccaagtatgatgggaaacaaaggttttgagcagggcagcaatttcatatgtttacatttaaaaagttaattttgtccgttgagtaaggttgtattggttattttaacactgtttagaatgatgagatgactttcttgacatcctgaatgaaagtcttcatgggtttatcaaaagcatgttttaaagattagcaggatctaaaaggaagctatgggtcatggaattttctcctgtgtactttttttatatttttgaagttcccataaaggatatgcattttatttttttaagtatttaaaacagaaagttaataggattatattgaagtattttgacctgtcagtaccaaggatattgattatttgcaatgtactgttttgacatttactgaattcacccatatggattataagtaacattggatgtcttaaagcttcagttatagaaatcattatctgggcaaactgtgactatcagtctccctgcattctgtgaagtaatttaatcctgtatcctcaactgttatccaaccattatcattttggatattttatttctagaggaagggtagggggaggattctagtaacccatgactaacagtgagtgagtgatttattctagctttgaacaggtcaagaaatccttttaaaaaaatgctaatatgatgatgaagggaaaagttggacctcttatacactttgtctcttgttaaataggaatctcattcttctcaactcatataacaggagaaatgttagattttcatttctaaaggatatttttcatggctaactctatacctttggcatcactcagcagagattattcagtgccttctatttgccaggcagaccctgagccagaacttagattttagtggaatgaggctgagtgttccataatcagtttggtgatcccttgacattgagtaaatcataaatsacttagtacccatgtgtgtaaagtgtgtaaaagctttgagtggatgcagtaacaagcattttacacacatacttgtattttatctgaggtacatgcttactgtcttttcctcaggaatgcaaacttcatcaggacagggactgtgtgtgactgttttgtttagtatctaaagtgatacagtaggtaatcagtacatatttattgaatgaatgaacactggggcctggtctgttttaattactgctctgtggcaaagcatccagtatggtgtcttgtacaaagtaagtaaccagctacaacagcaataatattaactgatgcattgagggcttcactctgtctcaggcacagatttaatcctcatggcctttctactacctgtgtgctgctgttctccccattttatagatggaagagttaggttttttaactaggaaatgacagagctgggagaatccttttgacttcagagcctacactgttaatgttttattgagttttcttccttacatgagtattgattgactctcctgaggagttcaaatcttattatgatatagtcttggttacaacatctgagagatgtctgaatagccttatgaaccaggttcatcagaatttgcaaagttgtgtgtgttactgttgatgtgacgttttatttcatgacagcacttaatcaaacttgtaacacttaaacttacagcacttatatcactcacattcactacattcattcattcttttattatttcgacaaatactaatatctactatgtgttagtcattgggctaactactggagtaccgcagtgagcaagacggacaagacccagcttttatagagcttacaattcagttgagggagacaaacatccaacatataattgtgacaggggtccatagacttaagcatagggagtaatgacatctatatatggattgggaatggtcacataattctttcctaaggaattatgttgatagctaaaaaggttgagagtaactctcgttacaggttggaccttttactgtaattcttttttttatttagactgtaagaartagggctatgtcatttatatatacacacacacagacacagcatgtgcagacacacccctccaagagcctaaagtagtgtttgtaatgtgaaatgcctgctgttagtgtttatttctagrtagatggaacagatcgtacataggtagaccagcataattctatgcatgtaggctaagagtagtaattcaccgttactgaagcttaaactgcatggtattggtgagtaaacagaacgtggtaggagatraggctggagaaatagttactgaaggaatttggatgctgtacttaggaacatgggctttatctaacaagacactggagaaccaacagagcgtaacaacagagagaataacatctgagttgggttttagctttgcggtagcactgggtaggctaaaatggaggatgtgaatgaggctagaggctgctggactgaagtttggaggtggatctgagaaggggagtgacactgagttgctagtatgcacctagcacctccttaggatcttaacatgcgtactctctgatcctcacaaccctaggctgcaggtgtcatccttactattacccccatgttgtatcaaagcccagagagattgagtaatttgcccaagaacttaacggggttagagtttggaacccaggtctgttttacttcagatcatttcttattttactatatttcttctttagggaccaggaggttatgactagaaagtagagtattgatttcagaggctgaacagttttgggtgataacaagtatagagtgttaactatgggaggaggttactgaaaaagactggatattaaggccattgacaatgtaaaaacaacttcccttacccctcaacaaaatgtcaacaaataaaccttatcaagtagttcttacattcagtaaatttggtaattaatgattattgccttatgacatctcttttcctgttcgttttttctttttaaaaatctggttttgtttttgtttgtttttttttttgagacaaagtctcgctcttgtcccctaggcwggagtgcagtggcgtgatcttggctcactgcaactccacctcccgggttcaagtgattctcctgcctcagcctcccgagtagctgggattacaggtgcctgccaccagcccggctaatttttgtatttttagtagagatggggtttcaccatgttggccatgctggtctcgaactcctgacctcaggggatccacccacctcggcctcccaaagtgttggaattacaggcatgagccaccgcgcctggccaaaaatctgattttacctttattttgacatgtgcctcttttttctcactgtgttttaaggttattgaaggtactgatgagtcataaatatttgatttcattctgtaaagcatattcttgtcattttagttgaagttcttgattgtcctggagattatgggatcatctgagtgttttggaaggcaatagaacataatggtatataggagcacacatttcagaatctagaggaccttgtttgaatcctggctagattacttactagttgtgtagccttatgcaaattatttagttgttttcaaccttttcttcctctgttaatggtagtattaaactatgtcatagaaatgtaatgaggcttacataagacagtacacgtgactggctcactaactggcacattttaagctacccaagtggtaggtattattgtagactgactttttttttttttttttttttgaaacttggtctcactctatcatgcaagctggggtgcaatggtgcgatcttggttcactgcaacttccacctcccgggttcaggagattctcatgcctcagcctcctgagtagctgggactacaggcacgcaccactatgcccagctaatttttgtatttttagtagagatagggtttcaccatgttggcctggctggtcttgaactcctgacctcaagtgatccacccgcattggcctcccaaagtgctgggattacacagactgacttcttgagatacatcttgtaattatattgatgattacaattgatttgtaacacaatacctttatttcagtggtagcctggataaccaggtgccttattttccttataatgatctaatatgtaacacttgtaggaatttgtagagtacttttcttgacttttttctttgagttaattttaataacattaattgcsttgtttaagtcagtcacctcttattgtactccagtatttttaaagtatcaacctgatactttaaacctggtaggagcacacatttcagaatctaaaggaccttgtttgaatcacttcactgaaacacagattgctattcacctgtcatttgccacttttccatcaggtttgccttaaataaatgtatttcatttaactacttttctgtatccttttttttttttttttttttttgagacagagtttagctcttgttgcccaggctggagtagttcagtgacacgatttcagttcactgcgacgtccccctcctgggttcaagcgattctcctgcctcagcctcccgagtagctggggttacaggtgcttgccaccacgcctggcaatattttgtatttttagtagagacagggtttcaccatgttagtcaggctggtctcaaactcctgacctcaggtgatccacctgcctcggcctcccaaagtgctggaattacaggtgggagccaccacacctggcctgtatcctgattttttaactttttttttgagacagagtcttgcactgtcgcccaggctggagtgcagtggcgtgatctcggctcactgcaagctctgcctcctgggttcacgccattctcctgcctcagcctccccagcagctgggactacaggtgcctgccaccacgcccggctaattttttttgtatttttagtagagacggggtttggtcttgatctcctgacctcgtgatccgcctgcctcggcctcccaaagtgctgaggattacaggtgtgagccaccacacccggccctgattttttaactttatgtatgggactcaacctgtgaaattattcttgacaaggagagggtgagtcagaatcatgtgttatcagctttcatttatatgcatcctttggtacaggtgagaggtagatgatttgtttttctgacattttattatgaaaaattataagcatttagaaaattataagaattttacattgaacacccatagttttcttccattaacattttctgtgcttacagtaccacatatgtgctcattcgtttatccatcagtgcagacgtgtgtatacttcccctaaatactggtttgtttttgaaagtttgttcctggcttataccctcctgtattctcagttgacagatctttacataaagagtctgcttttttctcatttttgtgcatcttagcactttagtggtattgtaatggaatattacatctagtatgtacagtgagagaggagctcttgaatttttggtattttctgaagtttaaaaaaaaacacctaagattacatagtgaatagggaagtaaaacccaaggtttttggctattatcttttatctcttgtttacttctcctgaccttactaaaacaagttcttttccaaaccaaatttatttatcattttagtaccatggacctactataagaattgttacatatcagtgattaaaagtatatgctcaaaaatacatatacttaaaatctaaaatatttaattcagttttattgtcattaaaagggtttttggrgaattatagcagtaatatatgttataaatatatatgctcatgtaagagtgagaaaagaatataaaatatggcaaaaattgaattttataaaaactttcctagaagaaggattgggaggacctataaacagttctctctgggctgtatggcaatgtggatgggttgttttytttttaattttgctttagtgtatttaaatttattcagtaaacctaaatttttaatcagaaaagacattaaaaattcagcaaagaaacctgttttgtagcttgtatttacattactctgaaattaaaaattagaacccatttaagggatgttgtgtagatcgtcatttggttcaagatttgaaaataaaaatacattttattagatacttaattctgaaccgaaatcagtgaaccaagcagggtggctaaaaagcacagatggatcagtaaaaattgaagcaatttttcatgtattgaaatgactatacatattttttcatgtattatctcaattatcatctgctataaccaaagagaatctagtattttcatttattcaacaggagggattcttagattttgtggataattgggctgagtaacttagttatccaccaacacagaggttctgtgattctgttcaggccagcaaaggttttttgaatgatcctactctagggatgtgtgtttttggggagagggggtgatgcaaattaaaatagtcttctttgtaggtcagaatatagctactatgtatagaatacttattatgtatgctataggtactatgctaaattatttacatacattattttattctgttatcaccctatgaagtaggttttttttgtggtctttcttttgccaggtatggaaacaaagatgaagcaggttaaattactcacctaaggtcacataggtagtgattataaagcttgattattgctctctggaattttagtttatgatggttaaaactgaggaatggaatagtattgaataatggaaagaccaccggaagtagagtcaaaaagcttagtttgtctctgcaactcacttgctggttaaccttagacaagttaattgacctctctgaacttcttgtttattctgtgaaatgtcttatttatgacatctttatcttcctcataggaaattctgagactcaaacatgataatatatgtgaatatgtgttatgaattgctaaatgctagactagttggggttgtcaggacagtggaaggggaagaaaagggagactgtttcctaactcttaacagtcactgttactttatttgaagttggattgagaagaatgggagtaattggacttacttgcacatttgtattacaattgttaaactcctaaggatactgatcaaaattaattttcaattttttatctttatttgaaaaatggccacaatagttaattgaatattctggttagcctattatcttaaggtatgtaaaaattatcaatatgcaagtwcaaaacatatttgttaaatattacatagaagctgttttttccctcatatttcagaagttaaggacctgaaaaaggtaataggtcttaaatttattggaaatactaaagcattatataaaattatcttatttaattctaacatcaatcattgaaggcagtgttttcatccccatattacagaaaggttaagtcattgggtcaagttcatacaactactcattggccgtgctgagatatgaagcccagaatgtcagattccaaagctcaggctctttgcttcatacatacttgtcttccagtatcactaaattccgtcagttattaaatcaatagaatttaggaaggtcagtgaatacaatgtgagtgttacagaactcagttgtgtttctgtatgttgtaatgaatagaaaataatagaaaatgaaatttgagtatttatgccatttttcagtagcatcaaagagcatcaagtagtagtaataaaatagtgcagaaactatgtagaaaatgctgatttgtactgtaagaggtttaagtatcgggttatttgtttgctcttccaaagagctctttttggtaaatattaagcaatttactattttatatcaatttgcttttatcgtagttgatgctgatgtaacagttataggttctggtcctggaggatatgttgctgctattaaagctgcccagttaggcttcaaggtaaggtttgaactcaaactaagtattgatttattttaatttgggaagggttgatcatatttataaagtactttgcaggcaaaaacatggtaaatacttccttaactctataaattacttgtaagcctgagactaataaagattaggttcatttggttgtagtattctcttggaatggaaagtgaaatctattagttttcttctcttcccagtacttttcattttggcatctaatcacactttggaagatacagtgatagaactaaaagcatatatttggtaatgttaagcacacaaaaatatcttttagaataattcacttttgggtcagcccaaaagtgtttattattattcaaatgataaattataaaggactatatattttagtctgtgaaaacayagcccgaatagcttgttttgtagaagaattaagacatatatttggaattttagtgatctgaaacattgaggttatgtgcagttaaataatgttttctttggttgtagacagtctgcattgagraaaatgaaacacttggtggaacatgcttgaatgttggttgtattccttctaaggtgagcatgtgttttgtacagcacagagattgtttttggctagcaaccaactagaaggatggattgagactagattagacaaatacacttgttaaaaaacaatccaagttgtggcacatttcacacagagaaaaaaaagaatgataaaaaacacacttctcttttgtaaaacttaaagagtgctgtcactagtctgccacacattcctgaaataacttccttgtctcagaatgcctagctttccattcaaacagactctgatgttctagttttttctctttatctttccttcaccagtgtaacagataatagatagtaaattgttcttttaggtcctttttgtatgtaaacatgactgcctttttcacctgccaccctgaagtgtgtacttatgcctttacttttaaagaaagtaaaaatgtctttttcattcttgtttgttgaatgtttttcacatcattattgtttgtctttgattaataagagaaactgaattggtgtagtgccatatactattccatgtagagaatgccatgtcttttttttaacttctttttaaatttttattgtaaattgacaaattacaattgtatatatttatggcatacaaagtggtgttatgatttatgactataatgtggaataatttagtcaagttaattaacatattcattaccacagtacttatcatttttgtgatgagaacatttgaaagagaatatcggccgggcgcggtggctcacgtctgtaatcccagcactttgggaggccgaggcgggtggatcacctgaggctgggagtttgggaccagcctgaccaacatggagaaaccccatctctactaaaaatacaaaattagccaggcgtggtgatgcatgcctgtaatcccagggacaattgcttgagcccgggaggcggaggttgcggtgagctgagatggcgccattgcactccagcttgggcaataagaacgaaactccgtctcaaaaaatgaaaagaaagactatcatttcataagtgctttttgattatttgaagtctgtttatgaatatttgataatttgatctttttaatttcctttaggctttattgaacaactctcattattaccatatggcccatggaaaagattttgcatctagaggaattgaaagtaagtatacttttcatgcttaatgatattaccagactgcttgacttggctcttctgtctaaagacttaaatgtgtctaacgtacgcataatagatgtttagtgraggaagagtaaaataaataatctaaaaaatgtggagagatttacttaaaaaagaaggcctaaatccagatttctcccagccaagtataaccaagcctaaccctgcaaatcsagatttctaccattatatcttctgttcctttgccaactttttcctgaggtttgcctttatgtgtttttgaagagtcagttttcatttcctaaaatctggaaatcactgrgaaggctggattcctgagtactatggggagatagaggaaggaaggaaggcccacttaagctgttgatagtagaaaaattagaggagagaaagagtgaggcatagcggaaaaggaagaggacatttcataacgtatcttgtctcctgacatactttttgagctgttttaatcttttgtctccaattattgttgttgttagatacttccagaaaggtagtctcttctgggcaggacctagtcataaccttgggttgttacttttccttcatttgtttctttacagaggtaggtttgaggggctacttaaggcaatccattgggtatagagatgatgtatatgcactaaagcaaatagaatatcatactagttgaaaaatggaatgacgtaaagaaagaagagctaggggtagtcaggagacctgcaytgtaggcaaggcttttacatcctagctctgtgaccttgggtaaatcagaaatctctcagagtctctttttccttatctctaatatatgtgttggttatatgaggtactttctaagatacccttcttacctctaaagtttaattgagttgagcatttttatctaatactgttgcttcagagttctcttctgagttgaatgagtgattaaaacctaggtgattaaactttttaatgttaagcttctgtatttgaaatttttaaacgtgtattttttatttgttttgtttcatgaaatctagcattttcctttatttaaaatttcagatgatgttttactttgtcatttctacttacatatcttccagacttataaccatcgtaaagtgttcagaggatatgttatcacagtgggatataatgttttattttggactgcctttttacccaaggtagacattttatagtgtttgataggttctgtttctgtgatacaatgatgttggccttttgtcaactataattataagttattacattttgaaactttaatactgccttttataagcattaggttgaaattttccagttggtgagtgaaaaacactgcatattgcttcaagaatttagctaagaactaaagattaattgaacaaattacagtgtccgaagttygcttgaatttagacaagatgatggagcagaagagtactgcagtaaaagctttaacaggtggaattgcccacttattcaaacagaataaggtcagtgtttaatattcagatttctgctttactttgaatacaaattaaactttgcattatagagtgatgatatttgaacttgrttacaggggaatatttatttaatttaaaatagcttgctaacctgaaatagatttccctgacatatatcacagatttttttgctgcaccatggtgtagcattactaagtaaggaagcattttgttttagataaattatttacagagtaatttttcctttgaatgatttatcaaacaaattactttaaactttgtgaatttataaagattatttygtaaaggttgttcatgtcaatggatatggaaagataactggcaaaaatcaagtcactgctacgaaagctgatggcggcactcaggttattgatacaaagaacattcttatwgccacgggttcagaagttactccttttcctggaatcacggtatttatgcttcataatttacaaccattacaacttttctttagaaatacgttttataagttatttatgctatttgtgaactttgagagatttctgactgaaatactatattttgatggtcattcagctttgggaagttacctgtctttattctgcagtgattctgaccagctatagaacactttatattaagatatgtttgaatacagtatgaagttaaaattgaccattgcgtttggaatattggtggataaaatttaaagtcagtgtttttaatgggatttgatgaaattaggtatatagatacctcaaaacaaataaatgacttagtatttttagtgattctactgagatcacagtttataaatacatttatctcttcatatccttggaggattggttccaggaccccccttggataccaaaacccacagatgctcaagtgccttacataaaatgacatagtatttgcatataatctgcatacttcctcctgtatactttaagtcatctctggattacttataatacctaatacactgtaaatgctatgcaagtagttcctatgctgtattgtttagggaataatgacaaaaaaaccatgtgtacatgttcagtacagatgcaaccatcaatttttttcctgaatattttcaattaatggttggttaaatctgcaaatttggaacccatggatatggagggtcgactgtactaggttttttcaaattattttgattatatcttttgtttttcttacagatagatgaagatacaatagtgtcatctacaggtgctttatctttaaaaaaagttccagaaaagatggttgttattggtgcaggagtaataggtgtagaattggtaagtgttgtctttctgcctcttattacctccttggagttggaagggacttaaaggtcccctttttgattttttgtataacattacaggctgatcagcattgagttttgcttaaacacttctagtaataaagagtttacttttgtttttttcaagacaacctatttatgtatttactcatttagaatgttctcctttattttagtctgtttccttgtaccttccacccttccatttcctagaactggtcgaattcttttttaatatgacagccattcagatatttgaggacagcttttatcctgggcaaattgcattccaaataaagattattctctttaccatcacatacatgatttggctcttcccttctctatcctcatcttgatgcctcttaacttaggttttagaaatgtcaaactacttgcatttctttgaacaccatgttattttagaccttctgtctgccttgttctcccttcttgtccatctggcagctttccacacatttccaatgacctccctccattttagagtcactgtgccttgtaaacaccaggaattgctctacttctgaaataataaattcagatattttattatgtaaccatgacctcctttcctcttttactcagttattcatagtgtactttgtacccttttttaggttttctagtccatagatctacttttttgcaatcttccctttccaatcttgactgcgttcctgatcagcttagatgccatagtccatcactttaaccacactcttacagatgtccttgagttgcttgtctcactgttctgtcatatctgcttggcaaaactctagttcggtttgaatgcagcagtctgccttttttatgctatttccaggctgttgactacacctggagaaaaacacaccctactcattggtacttgtattaattcttggcacaaaccttaacaagaacctcagccttgctgacagtttattatttcctaagatggtacactgccctggtctctgcaatggccattttcattttctactcttctcaaatctctgcttgtatactgtctgctctgcctgtggatgaccttgtcttttaaatattacataaaagagaaatcagatgagaactccctcaagttgatgtcctaaatttgataatgcttttacctgttgttacacctatccttttgattacctctcctattactgtggaaatgccattttccctaagactaatccctttacttgtgcttggtagcacatcatctgccttttcagagacttggttttgtgatttttattcttgtatttttcagtcttcaaactccttccttttatttacaatttcatgtgcttctatgtgtgtacctgtgatgcatttgcactcattaacacaggtttgtgtgcacataaatgctccttatcttggtcccatgtccttcttgagttaccaattttgttcgcacttttccttcaaaacccagcttctcaaaagagttgtccatgctttatttcatcaacttccactcactcagtctatggcttgtgccaataaattgctcttagggcatgaatctatttattgctcaatctgttggactaatttcttcactgctttatttggcagtaattagcattgctgattttcttgcctttgaaacactttgcctaacttctgtgatttcatattcttccatttttacatctgctctttgggctgaattctccatattatgcaagttcccctttcttaggcttccctttaattgttagtatttttgtttttctttttttttttttttgagtccgagtcttgctgtgtcgcccaggctggagtgcagtggcgcgatctcggctcactgcaacttctgcctcccgggttcaagtgattctcctgcctcagcctcccaagtagctgagactacaggcgcccgccagcacgcccggctaatttttgtatttttagtagagacggggtttcaccatattggtcaggctggtctcgaactcctgaccttgtgatgcgcatgatggttcatgtctataatcccagcactttgggaggctgaggcaggcagattgcttaagcccaagagtttgagactagcctgggcaacaatgtgagaacttatctctaaaaaaatgtaaaaaattagttgggcatggtggtgtgtgcctgtagtcccagctactcaggaggttgagatgggagaatcacctgagcctgggagtttgaggctgtagtgagctgggtcatgccagtgcactccatcctgggcaaaagagtgagaccctgtctcaaaaaaaaaaaaaaaccccaaaacaaaaatcagcttttaagttatctttttagtgaataattctttcttctaagaaagctcaagtctttcattttttgagtccttagtataatatatctacatttccatagtacccactaataataatacattgcatttgtttgtctatggctgactttcctataagaccaaagctccttgaaggcaggaccgaatttttaattcctatttgaatctccattgtttttcttaatgtttagtacttaggtctcctagacagcaggtctgttattttgtcatcaacctttggatcctgtctagtccgttaagaaaacttgtaatctaaacataatgttctgggttgtagagagtacttcttttgatatgcatagtatacttcttgtaatgtaatgctttgaaatcagtttagttgtttttataaagcagacattgagcttatgttcagataaaaaccacatttttttcgcatttggaattctgattttttaaacctaagtgactttgaacctttattcttgctttaatttaatcttgttcactcatactcattattccaatctatatcttagtcttgattctgtcactcttatacttaactgcttttacttttcatagttcgtaaattttggaagtatgacaattaaggcatgcagtcccatcatctgatctgatcttggttaagcaaacttctgttgtcattcacgtcattagtacaaatttttgaccaggatgaaacatcgaaagccatctgacagtacagtctttcaccagttataaacacctttgatgtttattcatcttcgtttctccatckcatctacaaggatatcatgagattttcttaaaattttttttaacaccttgctgatatcaaaatatactacattcaccagtccagaaacccttcagaaagtaagagtggtttatgtgacctgtttggaacacttgtggtagtgtctactgattgtgaaaccagctgattaataatgtcttctagtatttagcagaatctcttcttttccatttttgaaaatttaggcatatttgcctgtctgccaccttttggcagttcccttgtgctaagtaagttcccagagttcactgagagtgcctgttttgtcatactctaattgggttgatgggagaattaactttttttttttttttttttttttttgagatggagtctcgctctgtagccccggctggaatacagtggcatgatctcggctcactgcagcctccacctcccaggtcccagttcaagcaattctcctgcctcagcctcctgagtagctgggattacaggcacgcaccaccatacccagataatttttctttgtatttttagtagggacggggtttcaccatgttggccaggctggtcttgaactcctgacctcatgatccgtctgcctcggcctcccaaagtgctgggattacaggcatgagccaccacacccagccgggaattaactctttaaaaatgaccagttgttcttaatcttgggcgttgcctcttggttaataatatttcttctgttcattctactttgttctcatagttggataaaacaagaaaaaaggaataacatttactttcttttgttggtcattataatatctcgaagcaataattctatttcttcatctcagcagttttgctttaggttttttataagccttgagtcttttgacacaatgatttagatacctgttactgtattgaattagtttttacatgtctttttaaaaacttattagagaatttactgtgtagtcatgatatctatttattttcttgtaaagattattcacataactgtattttcattttttatattttgcctttcttccattccagtttagtgtagtattaaaaaacatcttttttggaattgaacagatttaaatttgaatttcaactctgcctcttactgacttatgttcttgttaatgagccactctgaaccagttggtttgtcatcaaaaaggggataaaaataactaacttacaggagtattgctgggatttaatacatttaaaacacttaatgcagtgcctggcatttagtaagctctaagtaagtggtagatgctattgagttttcctatctataagtattttgaaatcagttttcctaaagagtagggcacttgtctatgctcatcactccctactttgaattagactccaagatgatgtttcttatttccacactcccattatttcccctctatttacttctatcccagtttccaagaatggtcctttcttttgtcttgtttgctttttaaacagctttattgagatatagttcacatatcagttcacccatttaaaatgtacaattcaaaggtttttagtatattcatagagttgtagagctgttaccattgtctaactctagaacattttcatcaccctaaaagaaacttgctacccattagcagtcattctccatttctccctttgctcagcccctggaaaccactaattctactgtgtctatgaatttgcatattgtggacatttcatataaatgaaatcatacaatattattttgtgtgtgctctctttacatagcataatgttcttatggttcatccaagttgtagcatgtatstatacttcatttctttatctggctaaatatctcattctatggatatggcacattttgtttatccattcatcatgggtggacatttgggttgtttctactttcagactattatgaatgacactgctatgtctatttgtgtacaagtttttgtgtggttatctgttttcatttctcttgggtatataactggatgtgtaattgttgggtcatatggtaattattttaacttctcaaggaacaccgttacacttttccatacaatcccaccagcaacgtaaatttttgttgctctgcttttccactgacacttggtattgtcattttttttaaaaaattgagctattctagtggttgtgtagtagtaactcactgtggggtttttttttctatttttattttttaaattgctatgtaatagatgtacttttttcaaggtacatgtgawaatttgatatattcatataattaaatcagggtaattaggctatccatcacctcgaacattttttttaatgctaggaatattgaattattctcttctagctattttgaaatgtgtaattgattgttacctatagtcaaccctgcattaacaccagctcttatttattctgtctaattgtatatttgtactgatgaatcaacctctcttcattcctcttctccccctagccttcccagcctctggtaaccatcattttgctctctatctccatgagttcagtttgtttgtttttttttttagctcccacatgttagaacatgcgatatttgtcttcctgtgcttagcttattttgcttaacatgctgtcttccagttccatctgttctgttgcaaatgacagaatttcattcttttttatggctgaataatattccattgtgtatatgtaccacattttctttgtttgtctgctgatggacacttgagttaattctgtgtcttggctattgtgaatagtgctgcagtaaacataaagcgcagatacctcttcaatatattgatttcctttcttttggatatatacccagtagtggaattgctggctcatattgtagttttatttttagttttttgaggaaccttcatactgttttccacagtggctgtactaacttacattcccactaacagtgtatgagggttctcctttctccacatccttgtcagcatttgttattgcgatctttttgataaaagccattttaactggggtgagatgatagctcattgtgattttgacttgcatttctctggtgattaataatgttgaacattttttcatacatgtattggctatttgaatgttttcttttgagaaatgtctattcggatctggtgctcattttaaaattgaatttttttgagctccttatgtattctgattattaatcctttgtcggatagtttgcaaatattttcttcctttctgtgggttgtctctttgtggactgtttccttggctgtgcaaaagttttttaacttaatgtaatcccatttgtctgtttttgctttagttgcctatgcttttgaggtcttacacagtaagtctttgcccagaccagtgtcctggagcatttctccaatgttttcttacagtaatttcatagtttcagattttagatttaagtctttaatccattttgatttgacttttgtatatggtaagagataggggtctagtttcattcttccgcatacggttatccagttttcccagcaccatttatcgatgagactgccttttcctcactgtgtttgtggtacctttgttgaaaatgagttagccgaaaatgtgtggatttatatttgggttttttattttgttccattggtctgtgtgtctttttatgccagtactatgctattttggttactatagctttttagtaaattttgaagccggttaatatgatgtttccagctttcttctttttattcaggattactttggcagttgaatatcattggtagtttagtagggattgcattgaatctgtaaattaccttgggtagtattgtcattttaacgatattaatttttccagtccatgaacatgaactattttttgtgtcctcttcaatttgtttcatcagtgttttttagttttttattgtatagatctttcacatctttggctaaattgattcttaggtattttatattcattatagctattgcaaatgggattgctttttttttttcttttttagattgtccactgttggtgtatataaatgctactgatttttgtatgttgattttgtatcctgcaactttactgaattagtttgtaagtttaatagttttttggtggagtctttaggtttttctaaatataagatcatgtagtctgcacaaaagattaatttgacttcttccttttcaattcgaatgccctttgtttctttctcctctacaattgctgaggccaggacttccagtactatgttgaataaaagtggtgaaaaatgggcattcttgtattgttccagatattagaggaaaggctttcaattttttcccattcagtatgatgttggccatgagtttgtcttattattttgaggtgtgtccctcctatatccagttttttgagggtttttatcatgaagggatattgaatttttattaaaggctttttcagcatctgttgaagtgatcatatggtttttgttcttggttctgttaatgtgatgaatcatgtttattgatttacatatgttgaatcatccttgcatctctgggatgaatcctgcttgatcatggtgaatgatctttttatgtgttgttgaattcaattcattgtggttttaacttagatttctctaatgacttacggggttgagcattttttaatgtacttacgtgccatctctatatcttccctcttcagacatttgtccattttttattgaatttttcttattgaatttggagaattctttatatattctggatataaatcccttatcagatagaagttttgtaatttttttccccagtctgtggcttctgtttttgtgttctcaatgttatctaagactttctaattttgacaaagtccaatttatcatttttcttttatggattgtgctgttggtgttacatcaaagaaatcttcgcctaactcaaggtcacttctaggatttcttctcctaggtgttcttctggaagtttcatagtattggattttacatttaggtccatgatccattttgagttaacttttatatatacgtattgttagatttttagtgtcactatattgcctctagttaactcagtcttcatactagaaattaatgagattttttaaatgaacgcccacacctaatttagggaaggtaaacttttatagttcatttgaattaccagatgattttaatatacattcttgcaaaggatatgttcatggtttttcatatttaatgctgtgaaattatgttcatcttgccagttatgtattgtttaatatataattatttagaagttatactaattgtcaaaatgttaaaataaactagcattcagtttaaattataatttgaatgaaaaagtaaacatttgtcctttgttgagaaaagaaaataggaagccagtttaatattctgcaaacatcagtgatttagtaacctgtttccttttcctcaagacttttgtacttgctgtttccctctgcctagagcaacactcttgccccagttaactgggtagttcattgcctcactccttcaagttttgtgcaaatgtcactcccagtgaggctttccccaaacgtgctatttaaaattgtaatcccagtaatcagtggtcctagttctacttcctgttttatttttcctgtagcactttattctctgttatgaattttacatatttgtctatgtcccctgccagaatataagatccctgagaacagagatttttgctttgtttactaatgtatgcctagaagctaaaatattgcctaccatgtagtagatgttcaacaaatgttgaatgagtaagttaataaatgtatgaagttatacatatttaacacagggtcaattttaaacctcggagcttctcataggaacatactagcgaaagaagaaaatgttttacaataaattattaagatgatttcgtaaacatttgctatagaaacttttatgattattgggttttttwaatttatttgcagggttcagtttggcaaagacttggtgcagatgtgacagcagttgaatttttaggtcatgtaggtggagttggaattgatatggagatatctaaraactttcaacgcatccttcaaaaacaggggtttaaatttaaattgaatacaaaggttactggtgctaccaagaagtcagatggaaaaattgatgtttcgtaagtatacatcatttgtttttgatgtatcatccctgtctctttaagcaaaacactcaagtttcaaaatcagtttagcaaatatagggttttttctaacttaaggtcattttattacttaatrtaactcagttgcttatcaaattattgcattagcacattgaaatttatgattaggttaatgctagaaagagaatccaatattctcattgttgtgccttcttatagtacattcagaaaaatttaaattcccaataataagtaaaattgaatcaatatttttaggcagatacatggggaaatcaataataaaagattgcttactatatgtctggtactctactgattaaatactttaatggcatttaacttattgaattagtttttaaataaatatttaaattaaatagttaatagtatttaaatagtttaatgacttttactcaaagataagaagctgaattcattgactaattaatgactaacttgtcacacagctagtgggtggcagtcagtagttgaatttggatttctgtgactcaaagacctgtattcttaactgctgttttattatactgtggtttttgtgagattttaataacagacctctagattttaatgatagatctctttcattgtctgactcttatgtttatattcaaataaacttatattgttaaaaatgtcatcagtgccggctgggcatggtggctcacacctgtaatcccagcattttgggaggctgagatgggcagatcatgaagtcaagagatcaagaccagcctggcaacatggtgaaaccccgtctctactaaaaatacaaaaattagctgggcgtggtggcgcgtgcctgtagtcccagctactagggaggctgaggcaggagaatctctggaacctgggaggtggaggttgcagtgagccgagattgcaccactgtactccagtctggcgacagagcaagactctgtctcaaaaacaaaacaaaacaaaaatgaaaatgtcatcaacacttgagaaattgctggccttaaatttctaagcctatcaatttatgtaggtgtgtatttaacatttatacactgtttgttatctagtattgaagctgcttctggtggtaaagctgaagttatcacttgtgatgtactcttggtttgcattggccgacgaccctttactaagaatttgggactagaagagctgggaattgaastagatccyagaggtagaattccagtcaataccagatttcaaactaaaattccaaagtaagttggataattgtctgcattttcagtaattttaaaattgatttcaaacagtattttgaaaagtaagatttttatgcttaaaatatgtattggctttggggaagaatagtaaacttacaaaatgtaaaataaaaaataactgaattttactcaaagataagctgaattcatagatttttgaagagctgcatttgatgtattttttggtgacttgtttactggaaacttttgttaccataatgtaactgaaggtaagtagctgtgatttcagaaattcattgtgtttcttttgatttctgtggtagtatctatgccattggtgatgtagttgctggtccaatgctggctcacaaagcagaggatgaaggcattatctgtgttraaggaatggctggtggtgctgtgcacattgactacaattgtgtgccatcagtgatttacacacaccctgaagttgcttgggttggcaaatcagaagagcagttgaaagaagaggtaagtctgaacrtgggtggttttaagccaatgtgtgagttgtgccaatgacattggtggttgagaaacagcattttatcattatgctaatatatttaacagctgtgaaatattgtttagcttatatatttttcccttgttagcattataaagagatcattcacagatttatcagcagtaattgagaggaagagaagttgcctatattaaaaaactagtaattccagatcttttatatttggctttgaaatataaccagatggacagacatttgtatttgcttgtattcgtgcctgagatatagttcattaaccagtcttctggtctttcctttccttctatgtgctttgcgaacaattcccttcttgggatttattttctgaacaaatggtagatgattttacaaattggaaagaacttttctggcagttacgtagattctttttttctgactgtcacagggtattgagtacaaagttgggaaattcccatttgctgctaacagcagagctaagacaaatgctgacacagatggcatggtgaagatccttgggcagaaatcgacagacagagtaytgggagcacatattcttggaccagtgagtattgtaaaaccagagaaatcccattaagatttctagaaagcattgctgtttattaattataaaccacctggtgttagtctgaggttgctcatttccagcaaaactttgaatatggctctctgtgcatcatttctagaaggataccagcagcactctcacagtcttgcccactgtatcatctactttgtcctgcagccaagattctctctttaaaacatacaccagattatgccccttaaaatcctccagtggtgcttttcaacttcagattgttacatccaaggcctcactgaatctgtttgtgcctacttctctgacctcttctttttctgctctcttttactcattaatgccatgtcacatgggccttctctcattttcacaacagaccaaatatttgcattttagggcctttgtgcttaagataccctctgcttagactgttctgcctccagatctttgaatggctggctccttattattcaggtctcagctcaaatgttacctcctaagggaagcctttcctaccactgagcctaaagtatgtatctttcttgtagatatctcttgtatctgatgtaacaataatgagaatagaatatttgagtgctgtgtcactttagtrtacattttgttatttttacatcagctttttgaaataggtgctgttatttttgaggtgaagaaactgaatgaagcacaaagaaccaatgaatggttaaggtagtaagtggtagatatgaattgaaggccctttggctccagagcccaagctcttctgtgtcaccttttctattaagcttttcctgacttttcttcaactgataaagaaacagatttaaggcgtttttaagatctaaaagcttcccctcaacaattgctatcctattagcatgtagtttttgccttggaagcaaatttacttggcttgttattttaaagggtgctggagaaatggtaaatgaagctgctcttgctttggaatatggmgcatcctgtgaagatatagctagagtctgtcatgcacatcyggtaattattaacaacatatagaattgatggttgcctaaattttcttctgacccacaaatatttggattttaattttaaatttcttcccttgcagaccttatcagaagcttttrgagaagcaamtcttgctgcgtcatttggcaaatcaatcaacttttgaattagaagattatatatdtttttttctkaaatttcctgggagcttttgtagaagtcacattcctgaacaggatattctcacagctccaagaatttctaggactgaattatgaaacttttggaaggtatttaataggtttggacaaaatggaatactcttatatctatattttacataaatttagtattttgtttcagtgcactaatrtgtaagacaaaaarrtacttattgtagcatcmtggaatatctccgtcaactcatattttcatgctgttcatgaaagattcaatgcccctgaatttaaatagcttttttctctgatacagaaaagttgaattttacatggctggagctagaatttgatatgtgaacagttgtgtttgaagcacagtgatcaagttatttttaatttggttttcacattggaaacaagtcagtcattcagatatgattcaaatgtctataaaccgaactgatgyaagtaaayggtctctcacttgttttatttaaccyctaaattctttcattttagkggtagcatttgtgttgaagaggttttaaagcttccattgttgtctgcaactctgaagggtaattatatagttacccaaattaagagagtctatttacggaactcaaatacgtgggcattcaaatgtattacagtggggaatgaagatactgaaataaacgtcttaaatattcatttactggttatcatgagtacgtgttgagatggtcatagttttttttatgactacttctagtgtatattctaatttcttttctaggcctgaatktatctttattttcatgttataggacaatattaaggcattttaaaggtcatcatcctttcatctattttagatacacctactaaatgtttaatatatacttttggagaagtacaacataagggagtctttaatctgtgttttccttgkctgggttaatgactgtttatttaaagagtgytgtaaaattggatgtgtggtgtttaaaatggccatgtcctgaggaaacttaagtaacaaagtactaaatgctaagtaggcttttgcatattgtaactaaatttaagaataattcagattaagtagttctgaaatttggtatagatagcatagattgtctcatgctcatgagtgacataatgaccctggattctgttacatacttctaaagaaaattgattgttgtcttaggaggcagttaacttggctgaacaccaactccacactctgtcttgtttgtaggtggcagcagctgaaatctcttctcagttgttttagctttagctatgctgctggaagtctttcccatgcaagtgtgtagttcaggggtcaaccagagtttgggcagaaggaagtctgccccttctgtgcctcctgttttttgggggtttcccctttatgttccagctgttgtggttgccccatattctgccytctgatccttaaccaataaaacttggcttttgtttccccctcaagtgagaacccgttaaaaatgagacattgagccagtgctgttcactttttaagtgccaacttccctctactttccacttgtttatagttgtttccagtgcctttagttttttctaaaatatatttgttcagagtttgcagttgctatcagcaggagggttggtctgatatctgtgtgctactttgccattattrgaagtgaactctgcatctttttaaaaatttgaaatcccggtatcatgtgaagtgctgtttatgtaaatctcaacatatcccttactcagggaaaaaaaagtttttagttagggaatagtgaaatataatttaatatggaattctagctgtagagttaaatccatctttaagtgtttacattcagtatgagaatgcaaatttatctgtatggggaataaagtcctaggaataaaacaagttttaagtgttcacttactgttatctactaagctgtcaatatttttgtggcttgtgaagagtgaaattaattgtccacttcattgaactgattaaaattagtaatttcaactggctgggagcggtggctcactcctgtaatcccagcactttgggaggccggggcgggcagatcacctgcggtcaggagtttgagaccaacctgaccaatgtggtaaaaccccatctctactaaaaatataaaaattagccaggtgtggtggcaggcccctgtaatcccaactactcaggaggctgaggcagaatcacttgaacccaggaggcggtgagctgagatcatgccactgcattctagcctggcgacagagcgaaactccgtctcaaaaaaaaaaaaaaagtaatttcaaagtgagatctttagttgtttagctgaaaaggaatggagagtgtttctactgttctaagtaaaatactacataattgctctagtagatgatggggtatgaccatttttgctagttattgggatttttttttttaattaagttctggggtacatgtgcagaacatgcaggtttgttacataggtatacatgtgccatggtggtttgctgcacccatcaacccatcatctacattaggtatttctcttaatgctatccctcccccacccccatccccttgtccatgtgttttcattgttcacctcccacttacaagtgagaacatgtggtgtttggttttctatttttgtgttagtttgctgagaacgatggtttccagcttcatccatgtccctgcaaaggatgtgaactcatcctttattatggctgcatagtattccatggtgtatatgtgccacattttctttatccattctgtcatagatgggcatttgggttggttccaagtctttgctattgtgaacagtgcctcaataaacatacatgtgcatgtgtctttatagtagaatgatttataatccttcgggtatatacccagtaatagcattgctgggtcaaatggtgtttctagttctagatccttgaggaattgccacactgtcttccacaatggttgaactaatttacactcccactaacagtgtaaaagtgttcctatttctccacagcctctccagcatctgttgtttgctgactttttaatgattgtcattctaactaactggcatgagatggtatctcattgtggttttgatttgcatttctctattgaacagtgatgatgagctttttttcatgtttgttggctgcatgcatgtcttcttttgagaagtgtctgttcatatccttcaccaactttttgatggggttgaagttctttgcaaaaattttctcccattctctaggttgcctgttcactctgatgatagtttcttttgctgtgcagaagctctttaattagatcccgtttgtcaattttggcttttgttgccattgcttttggtgtttcagtcatgaagtctttgcccatgcctatgtcctgaatggtaattgcctagggtttttatggttttaggtcttacgtttaagtcttcaatccatcttgagttaatgtttgtataaggtgtaaggaagggatccagtttcagctttctgcatatggctagccagttttcccaacaccatttattaaatagggaatcctttccctactgcttgtgtcaggtttgtcaaagatcagattgttgtagatgtgtggtgttatttctgagacctctgttctgttccattggtctatatatctgttttggtaacagtaccataaaagtgacaaattattgctttgggccagaggaaagttattaacttacagctgtttacataactgttgtccaggcccagcttcagatgcagctgtgttggatgtgtgggtggttgttaagcagtccacagaatagtcttgctctaagaatgtgtgaaaaaaacacataggggctagccttttatacagctagttaggcaataaagttgacatgggcctggcaattactttcgttagattagttgcaaaatcacataaaatacaatacaaaagctgagaaattagagcatcattctgtgctctgtagtataaaatacaatacaaaagctgagaaattagagcatcattccgtgctctgtagtagcattgctcaattggcaggagcagtatccataaactctggcctgatttaactgaaaccttcccctcagtaaccctagtccttttctaggtggtaatgactacaaaccctagtacatcctgctgattttctaaaatgttgctttttctcattcctagagcaaggaatacttacttacaggagttttgatggctggagcaactcagcaaccattgaaatagtgatggtagcatagactatatttgtcctccttaacctcaacctgggaatcccactgggaggtgattgggaggaggggagtcaagggtgtggagttttggaggatgtttacctgtcaaataaatataatagcttgtttatagacaacataaattagggtcttcatggacgcagtaaacttgtttataaatccacgtttacagtgaaaaaagggattcatcaacaatcagtgaaagtaacaagtacaccaaaatatatacaaaagcactgtactttatttaactccatacaaaatgtgattaaaaacattaaataggtgatgttttattttgaagagcattaagtcagtttttaaaatgtagttgttttaccttggtcacctcagccattttttattctcctctgttacaagcatgtgctatacacagcaactttctggcttatatcctttaggagtgaacggacttctccttccagtcttgctaattcttgagctttatcttctaagtatctttgattgtcttcatattttctttctaaatctgtggrgatatatatatatataaagtctgagcaatttatactatgatgatctcaagacaaagtgaatatatttttcacttttaaataaactatggatgccttaaagtaatttaaaaaataagcctgtgtgaaaagacccacctttgagcagttgcagcttgctatttgcttgagctaaaagagtttttgcttcattttgtagcatttcggctttccttctggcatcagctgactcttcagtttttttggcaattaaattttctacttttttatacttttcatcaagttcaccatctaaagtctatagttccacatttagacagaaagaagtggtaatgttagtgtcagtaattacatttaagagcaatagtgtaatcatggcatgcattctggattaagggccaccaaggatattcactggtaagtaatttaaaattttatcttcaaacagtggaattgaatgcaaaattgacctgattttaaagaacatttcaaaaaattctggagttgcagcaaatccttagggctaagtcctcattctcctgattattacttttctatagaaaagttgtagcataattgtattgcaaattacatagagaagcgcagatttttcaaaagtagattagacattagagaagcccatattgaagaagtggaggctctttggatcttgactaaattaggatttgtgaagacttgcttataaggaaatcagaggaaaaagattaaacaaaagatacaggaaggaaaggtgagattgtagcatatgcaagaagtgagtgaggagaagagaaatggggtgtggggttggaatgcaaatgattctttttagaaactgttcaaatagccatttatggaaatttcatttcaagagattttgttcctttctcttgtgataaaatgtcattatgcaaaatgccctgaagcagagtacttgagaaatttgtgtcctcagtactgcaggaaaccacacaaaccaaaacagaaaagacagctgtctgatattgtggcagtgaacttttctcattgttttgttctctttcccaacctagagagaggtagggaaagttactcttacgtaatgcccgaaaagctacagtaacttccagaaaatttttgaatagtagggagttaaatactgaaattaggtcagtaaatgcaggtgcccccaggcctacggaccagttaggaactgggtgggcaggcaagtattattgcctgagctccaccttctgtcagatcagtggtgacattagattctcataggagcacgaatcctattgggaactgtgcatgcaagggatctaggttgtgcactccttatggaatctaatgcctgatctgagctggaacagtttcatcctgaaaccatccccacccccgagtctggaaaaattgtcttccaggaaactggtccttggtgccaaaaaagttggggaccagtgattcaatggttttaagccccaccccggcgccaccaagtttttaatgttctctttagaaataagcattattgagaaactgaacatgtgtttcagttattacatggcttctgattaaacatttgggttgtgtgagtttttctctgcaaaatatagtgccttcgaatgagaggtgaggggtagttaattcaaaatgagtctcaaagagataagatttggtttcctactacctgttctctgttccaacctgcttgtaaaatattctcaaatggcctgataattactatatgccatgaagaatttaactgactaccgcacagaaataaaagttcaatatgactggtttttgtcaatatagttggtttaaaaaaaaaaaaaaagcctgttttgagacttctacccctaagttaattccgttcttctaaactcttgtccaaatttggatttgaggacataggtcatacttattagatatttccatattctttcccatccacacttctaaagacggctgttgcaaaacaggtcatttgatatttctgatgaattctgtttctgttaggtccatgtcccttactctaaggcaggcaaggaggagactggtggctcctttaacaacatagctctgaaattacaaagatttacgtaccttcttaacatcttctgcactttgcttcacagtatatactactttttcaatatattctgcctccccggagttttgggcagctttccgcttaagttcttccacattcctctctaactcgctgatgcgctgggacgcgttgaacaaggtttcctcagaagctgctgtttcagactcaatctaaaagcatgtcaattttccagcaagacattagtttaagaaatggaattactatgagtacaagtttggaggaagatttaaaagtctgctgtgccattttgctctagaccaaaagaagtaattactaaaaagaatatttcaggaaaagttacatgaagtatctaactttagtctttgctacatttcatatattcacttcattctttcagtacttctgatgatctaagctgagattgatgtaaaattttttctgacagtaaaaaaaaacaaaaaaccccaccyccccaaggagcatgatgtgttgagaaagcattttaaggacacctgcaaactttggctaaagaacattcacaaataagcagctgtgcgaagagggatttccacataaatttccaacttaatgtgagtgggaaaataaatgttaaactctagtagtggagatttcagctaattactgaagacatggagactagggatgttctttgaatttctatagaattgtgagatgatgtatggtctgggaacgttacagctgtaaactctaaatacacaaagttatttagggaaaaaaaaatatctgggcaactggtgaggatccacatctgatctcctttcaaagtagaatcaataaacattgacttttaaaagctagccaaagtaagcagttgagcccatgacaaaagaatcaatttcactgagcactcaatttttctttaaaatgatcttcaaggatgggtctaattacatagaattaactgaataacagtactgctataatgaagttaataagggtcagtataagacataggctaaaatttgtaaatatttcaaacctaaggaccctttaattagaataaaattcttagaaattataattcttagaagataaagtttgagtgaattgtttctgataagctttcatgaacacagtttagttagaggttctctttgtttcttattgttact

SEQ ID NO: 93644 - DNA, 67013 bp, Homo sapiens
agcaagtattgctgccttttaaaaaatagacattctgtctcaaactgagtccaaatgtccttgaaaaggtcctcataaatgatatctttttcagcttttggaactgagacttaaaagttgggtaatttgttcaaataagtggcaaagcttagaactggaatctaagtattgcctacagtaaagcacatgttcatccctggcactgtcctttccaaacattgttggtccccaacaaacctctaagttctttgaaactatagattggcattaaaggaaaagtgctacttgctccatcgcatttaggcactggttcattcatacattccaaccagtgtttatctgcttgctgtgttgcctggcctttttgtttttctgccctgtatttctctccttccgtgaacaacttttccccaaaacaaattctgtggttctatgagagatgctgttttcacactaggaccctgttgaggggtttggagtagtctgaccatgctgtttgatcacagtacctcattctctgaccatagatcataatgcacttacattactgaattgggatactgaaaattttactaatgaaaaaagggaggcttgtgggaattatttgcccacagtatcacaaccagtaaatggtgagggaggacaggactccaaccttgccttaagtctgaagttaagcaatgcaaacattgatacttgcctataagaaactaacatgcgccagggcacagtggctcatgcctgtaatcccagcactttgggaggctgaggcaggcggatcacaaggtcaggaggtcaagaccaccctggccaacgtggtgaaaccctgtctctactaaaaatataaaaattagtcgggagtggtggcacatgcctgtaaccccagctacttgggaggctgaggcaggagaatcacttgaacctgggaggcagaggttgcagtgagccaagatcacaccacagcacttcagcctgggcaacagagcgaaactccatctcaaataaaaaagtaaaagaggccgggtgtggtagcccacacctgtaatcctagcactttgggaggcagaggcgggcagatcacctgaggtcaggagttcaagaccagcctggccaacatggtgaaaccccgtctctactaaaaatacaaaaattagctgggcgtggtggcaagcacctgtaatcccagctacttgggaggctgaggcaggagaattgcttgaacctgggaggtggaggttgcagtgagccgagatcgcgccactgcactccagcctgggcggcagagtgagactctgactcaaaaaaaaaaaaaaagtaaaagaaagaaagaaaagaaattaacatgcaattgaatatgggggcatttttagacttattccaacttttcaactggatgagttgtcatagaaataagcaaggcatggaataacctacaaaagtattaggtaaaaggtaaaatctaactcagattcaaaagtaagttggagaaaatacaattatgtgtccttaatatcttaattttatgttgctactcttgtgccaaaaccttagctataacctgtctattaataaaactattctttcttcacccagaaaatcaccttatatataactggtttatttcccactggtttagttcctctaagatgtcccagcaggaagctggataaactggtctcaagcctgatagagaggcctgaactgcaggtataaataggcaaattctttaaggcagtttttaaggtggagaaagaatgatttttttattaaaaggttaaataggaaaacagtaaatatgacaacaacaggactcctcatcttcttcaaatcttgccctctcatggtaccaaaaaaatgtacttaaaacttaaattccaccatgttattcttttgtcttagaatctgacagtggttctgatcacccagaagatcaggtccaagttcttcagctctcacccaatccttatattacatttccagtacaaacatggaacacatagttcccttcatgcactatgttttttcctgccttattgccttttattacaaacatcacttctctctgtaaagctctctcctttctcttcccacttttaccactccactactgccatctgtcttgctagcaacatcttttaagacttggttcagaagttccttcccaacaccacaggctggggtaggtattcctgctctagactcataatatccagttcatgtctccattagtgctctttctacattaatagtattattacctaaggttatattttgagttccgtgacagtgcttcaattttttacctccagcaaatagcttggtgccaggcacatagtaagcactcagtagataatggctgaatgaataaattcaattctttcaatatgcactcaccaaatagttactgaacaattaacttttttttttttctttttcaaacggagcctcaccctgttacccaggctggagtgcattggcgcgatctcggctcactgcaacctcctcctcccgggttcaaaccattctcctgcctcagcctcctgagtagctgggattataggtgcccgccaccacgcccagctaatttttgtatttttagcagagatggggtttcaccatgttggccagactggtctccaacgcctgacctcaggtgatccacccgcctctgcctcccacagtgctgggattacaggcatgagccaacgctccgggccacactttattaataattgctgtgccttggtgctaaggatcaaaacagaaaatccttgctttcatgttttcaaactatataaagataattatattaatttcctattgctgctgaaacaaaacacttcaaatttagtggcttaaaacaactcaagtttattatgtcacagttctgtaggtcagaagtccagcaagagttgactggttcctctgttccaggtctcataagggtgaaatcaaggtgtcagcttacctgagcttttgtctggtacctctggggaagagtgtgctttcagttttatttaggttgttgacagaattcaactccttgcggctgtgtggctgaggtctccatttccttgctggctgtcagtcaggagccgctcttggttccctatggcaacctgcattccttgtcaaattgttcctctcattatcttgatctctctgactttcgctttgccacatctgtactgattttaaggatttatgtgattagattgggcccacagagataatccaggattattttcctttcttaaaatctgtacccttaattacatctgcaaaaagtcccctttgccatgtaaagtagcatattcacaggttctaaggatttgggcatgggcattttttagaaggccattcttcagcctaccatggtgattattcttctagaattattttctggcatatccctcccttaggtgatctggagagatatcttgcaccaatatggcttaatttattttggttataatgttaagttttatttgaacaataaagatattagcagctcttttaaaaagctatgaaccagaccagaaaggagtgactatggatgtagaagagctaaaatagataaatcaataataaaccttataaatagaatgagcatagcaagtaactgatacagggcaatgtgatgtctcttttacccagcttccaaagaatatagcgttgaacaattactgtatttagcattatttcaagtatagatgatttcctgaaggcattagtctgctattatacacaagataatctccaattttgcatactactgaatttgtttgaaattaaatataattctcttttgtctcaaaactgcccaacatcaaaagaatcataaatgggttttattttccatttttaacttatcaaactagtaatctaaatgaaactaaaaatcaattcaataatacagaattttagagagtctactatttgttggatgttacgctagatccagacaatacagtttaccttacgctccttgactgcaggaaactggcaggcatataaacaaataaattataatactgtgcagcaagggcaataagagaagtgagcacaggtggaaggaatgattcattctatgagtagtgaggtaagattttcctggctgaaggacaaacaaatctttaggaggacaaggtggaaggggagctaagccaacagcatgaccaaggcactaagtatgaaaaggaacaagagtatctggggaagtacaggtgtggctggaggatagagagtgagaggcaagtggtgaaagtaaaggctggaaggtcagcagggtcagaacctataatttcattcggtatattctgtgaagatgtacagccagcaaaagctttttaattcgggaaaacacgattggacttgcactttcaaaagattaccgtggttgcacagaagagactgactgggtcagaggttagttacaggctggaaaaccagtttagatgaaactgaagagcaaggatgaaagcctgaactagagcagtggaaatgcgaatgtggagcagaggaacgattcaagaaattctgcggtaaaactcatcagacttcatgactgattaaaggtatggtggtagacaagggagggagaggaaggataagaatggagaagcaggaattgggcgttatttgaaaatttctgacatgggaggaaaatctggatatttaataacatctgactaaattaggggatgaaagagcataagcggagagggaatggtggtgctctctccttgaccatactttagttaggctcctctgagccctcttcccaactaggcctcatccttgggcccctgtcttaggcctgctgagtccagttttagcaagaatcttgcaaagtcagtttagagagtatctcctagccttgataattgatcatctccgcctgtcttcagcaagaatcttgtaagtcactttaacaagaatatccccgacccttgatatcacttcttagtaattttccatgaactgacccctcagtctgcttgctggttataaatcctagctgtttttgttgtattaaaacttgaggccaatctctctcccccatggtgatagtcatggcacctattgcaatagttctaaatgtcttccttgacattttaacaagtgtcagaataatttttctttagcaacaaggaggaatctgtctcaaaaactaaagctccttccacacgcctgtaaggcttaattggtgcatacatcttttaactctcctgtagctaaataacatgtctggcttatccaccgctggggtttaccaggcattatgatgtacataatccagacactgtgtcccaagaacatagcaagctggctttccctccttgatttaaaaaaatcaaaacaacacaactatcagggtaacatccactacatttgacaggtcaaagaatccccttccttaaggactttacaataaccttacagggggctaaagcatacatacccatgggtagtgggtaagccttgagagtacagtataagtcttgataacattttgaggttgataactagttgaaactgatctgttttcccgacctcaacgtaattgcaaggtcacttcaagagggtaaggggctattgcaactacccaaattcgctattgtagtataaaagctttaattaacagcatgtataggaatgcaaagctatgttctaatgaaactttaaaaagcagacacaaatatgaatgtcatataattgtcatctgtcgcaaaactttttttttaacctttgaaaaatgtgaaacccatttttagctcctagtacagcagaacctgcggtgggctggatttgccctgagggctgtagtttgcccctgtggtacgtatgaaatgccacaattttaaaaagatgtgttacgtgtgggaccatttgtggggcggtttatgctaacttccaatacagtaatatatgtcaactcgcttttgagtgacatttagtctgggtggccatgcccaggaatggatatagagaaaggggcgcggccgcgccgggcaccaccctccaagagactggtatcgcagcccccagctccaaggaactcagcgcaggcaggggcttcagggacgcggagagggaggcttatctctgctgaaagggaatagcggcccgcaaacaagcaaaccaggacactgctccgaggtcccgcccaggaaggcaaaacgaagtcccaccgctctcacacccggcaaccaaccaaggcacagcacgccccaccrgcaagccacgcctcgcgcatcacgcacgcacgcacgcacgcacacacgyctgtcgcggcttcccgccttgcgctccgtcatgctctattgcgcatatctcggggcgggggaggaacggagattgacaaggaggcagaggcctgagcgaggcggaaaatcctcaccccggcccgcgggtagacccaaacttctagcgcgtcacttccgctgggggcggagcggggcggggctgagtgggtggcgacctagctgctgcgccagtgtttgtgttggaagctcagctgatgcaggccggttggagtggacgtcattgccgggaacgagcgagtcgccgctgcagccctagtgactgcggcctgcatcccggtaagtagccgcgaggggacaggggcgggacgataggaggctggytgatcgttctggacccttgtccggcgctccgggtcgtcctttctttctttggagggcrcttcccgagcgagagggtggggacacgccaggctttggggaggagctggcgctggaaggagcccgcaggtcctggagctcattggtactcggcgccctccgcccccgtgggctttgctgccccagaagcgcaaaccgtatttggtttcgcaggtcccgccctgctccccctgtcccatccccacgactccctcctcaattttccagagtctgtctgccttcccctggactgtagtgttctccagtagttaactggtcactctcaggagggtttccctagtctacatcattctcgactgtcagtgtgcacctggtgattctactgcctgatattttttgtcagtaatctctttctgaccccatccacatttgattctatccttgaccgctgttgcttaagtggataaggtgtatgaatcactgtgttgcagtgcttcctatccctgtgtcatttctatcattgtgctggaaggaacctgctttccacgcctaatacaatgataactttaaaatggtgactcataggaaaaactcaggagagttgtgacataagggactatcatataatcctgcttaaaatactgttttcaattccaaaacagttgtatcctggttctgcagtcctaatttctgagagttcaaaaatgacaaatgtttcagtgtattaagaaaatgctgttaaacagtgaaacattaagagcttatgccttgtgaggcagttgtatcaagcccattttagctattttgttaaattgcttatgcaaattagttgtcctttcaatataagaacatgtttttatttcgtaattataatcaactttttcttaatgttgatctctttttttatttctatathaggactaaattaaaatcttgtaaacgcccttttaatgagtgatgttgaatgaaagggccagtttcactagtttagctattcacttgtttcacatgcaaagttgttacaagaacagcctgtactttgagttgtttttttttaccccagttagaggggttgtgctgaagctgcatattgcttcactcatggaatatatatttgtaaaaaggtcagagttagaatgctgagccatagacaccttcctgtcctgccattttttgttgttgttgggagtctctctctgtcgcccargctggagtgccttggtgcgatctcgactcactgcaaggttcaaacgattctcttgcttcagcctcccgagtagctgggatttacaggcgtgcgcaaccacacccggctaatttttttaagtagagacgggtttccccatgttggccrggctgctctcaaactcctggcctcaggtgatccgcccgcctcggcctcccaaagtgctgggatttcaggcctgagccaccgcacctggccagtcatttcttagttcttatctttctctgcagtactcaagtattttattctgttcattatccattacttgaaaaaatttggtcctgtcttggttttcagtgtcctgattttttcagggtggcttttctcctgttttgtttcctttagagtcttttcttcctcttcctagctctgggtggcactcaaggctctacccctgtcgctctccctaaaccagagtttcgtgtttgaaacccaaatatacttcagtgggcatgtgaatatcctgaaatattatggaaaatatagtttgtattgcaaatacacatttttcaaggaagaaaagctttactcaggttgcctgatcccaaaatagtcatgtattattactgtaaactatcatctggtaaatmcgtctaatgttgtggtttctgctgccactatgctggtaattccacaagtaaatccacagtctgtgtacatttccatttgaatgtcccactgttacttcatcctgtgaatccaaaagaaaatgtgtttttctctcmtattaaattgtccccttcacagttttctcatattcgcaaatggcactctccgtatttttcagatttaaaaccttagagctctcttaacacttccctctctttaccccattcttggctgtcaagtcctgtgttttgttgttttctcttttttcccttactttcaaagtgttcagagtggccctcttccccacactagtacttgctgggtgaggtgtcagagccccagcatcagaaagtggtcagcttggggtagtagggtagtaagaaaaatttaccgacaacacygtaggtttgaaaaggaaagttttattggatagaaagagtgctgcagaagagtgcagccaggcgcctcagcaagagaggacagctcaccgcagtggattttttcttaggggtatttatggaccttaaagcagaagctgaagggtaacttggaccatattagccacgtaggtcatgatcagtgattacatttrtagacattttggtgctttgatatcagcaaaagttgcacagtgagtttcgacatgcatacattctggacatgtatagagattctagttacttataaatttctgggaaagaatcctggtaccagatgccggctttagctaatagagaagtctaattgtttctgaattcctcagataaggagctttccctctggatggtctgctcgatggccaccaggtgatctttgctctcctcagtactgttaccttcagactgttgtcacccttttgactgttatattaataattaagtgasatactctgtaaattcattctttccatccttagctgggtctccatctaacaattcccttaattcctctagttaaaactccattcccttctctaagtgtttggtcccagcctctccgttttgttttattcgtacctccattgtatttatactacctctattcttccttgctcttttttcagttgatgatagcatctcactttacattcttcttcctgtgtttttgccatctaacttctggctgaatgtactctcaaaacacttaccttgcatttactagtgttgtgatttgggggcaattaaacttattgattttgttggtcatctttgttttgtaatttttgcttgatagttgtagtttctgagaaaggtgtattaaatctctcatgattatgaaattgtctaatcttgtaatagttcccttattttggccttttgtactgtattttaatgccaarttgataggtggtttcataaattcgtcatattggaaagaaacaatgcaaaattcttaccatagcctagtctccatttcctgcctgaattttggggtctgtgaccccaaaatatctgagacaggtctcaatctagaaaattttgtcgagtttaaggacgcacccgtgacacagcctcaggaggtcctgctgacatgtgcccaaggtggtcagatgccacttgcctctatacattttagtgagacataatgcatcaatcagtcacattggtttgatttggaagggcaggacaactcaaaggggacggggcctccaggtcatacaaaaattttctaatyggcggttggttgaaagagttactatcagtagaagaaatgtttgggttaccataaggaggtgtggaaaccaaggttttatgatgcagatgaaggctccaggtagcaggctgcagagtgaatagattgtaaatgttttttttttttctttttttgtttttttttttgagagrgagtctcgctctgtcacccaggctgcagttcagtggcaggatcttggctcactgcaatctccgcctcccgggttcaagtgattcttctgcctcagcctcccgartagctgggactatagtcacgtaccaccacgcccggctaatttttgtatttttagtagagacggggtttcaccatattggccaggctggtcttgaactcctgacttcgtcatccacccacctcggcctcccaaagtgctgggagtacaggcgtgagccaccacgcccggcctgtaaatgtttcttatcagacttaagatctgtgttgatgtgaatgctggaggggtataatgaggcacatccaaccccccttccatcgtggcctgaactagattttcaggttaactctggaatgcccttggccaagaggaggggtctgttcagatgtttaggagagctgcagaattttatttttggtttggttcatctttatcattctattttttccccttacttgcctttaaccaccttgtagttcttgctgtttgtctccaaattgtgggttgttttttctctctgactagaatgcttttttcccagattttcttaataattttcttcctcccttcattcaggtttccactaaaatgtcaactcagttctgatcacaccataaaatagcactctgtggccttcttcccctcctcccgctttattttaattcatggcacttctcaggctgactttatacattacgttatttgttttatttctcaatagattgtcttctcctccaaggtctacatgattacctgaagtttaataagtaagtggatcattcctttattttgtaatgtctcctttttatccataattaatgcctttcccttatgtttaccttcaaaggctttttaccttctgatgggtagtttaggtctggtataacatttttcccagtcctgtattttcagcctttcattataggtgtgtttgtagctagcacatagctggagttttcatttctaagattttgctgtccttgtttattcttggtacagttctcttttcgactctttattttccttctgtttcatctttgaacattttagacctacttaatttttttctatttctaaatcttagttacacatttttttttctggctatatttgctgatcctctctgcaggtgatggtgcatttctttgcatgttttgtaacttcagtgagttcattttccatagtggttgcttggtgtaggatcccattgcccatagggtatctgcaccttgaggatagtatgactgctgttccaggcctgtgggtcctcttaaacctggagattttttactgttgactttgagcatggctttattattttataaaattattttttattttttaaattgccagataaaggtgtatgtatttatggtgtgcaacatgatgtttttargtattattttcattgtggactaactaaatctaacatatgcattacctcacacagttatttttctggtttcattttacagtctcagtattcttcaagttgagcatgaatttttttttaaatgatatataatatttgtatatatttatagggtagatgtgatattttgatacatgcatacaatgtgtaatgatcaaatcggtatttagaatatgcatcaccttgaacatttattttttcttgggaatatttcaaatcttctagctattttgaaataacacaatatgtcattgttaactatagtccccctactgtactattcaaatactataactcattacttctaactgtatgttcgtacccattaaccaacctctcttatcccctcctttccagcccccaactctccctcacacactgttcctagcctctggtatctatcgttctactctctatctccatgagatccaattttttttagctcctacatataagtgaaaacagagcatggctttttatccacaagtattttatattaagtgtttttgtgtcattggggctgcagagcttttatgttaacttggcttatcttattgactgtaagtcccaaggagttcagaagagccttgtagggatcgagggaaaatttccccttccacctctgccggtttgctgaaaatcagctgacagaaacagattagtaagagaaatggcatacaaatttattaatgtgcacaggtgagaatcacaatgattacttaaatatcccagtggggcccacatacttatatagctattttcagaggggaaggaaagatggtgaatggaggtaattctctcgagcggcaataactgattactagggagaaggaatggacggagagttggaaggacagagacgaacttgtattctctttgaaaactgaatgagcctaagagacagactttatcttgtgaaagtgtcctttgggtgtggttacattcttcagtcttcttttctgcagcaaataataaaattgttttcccttctccctgaggaggagaagggaaaacaattgttccccttggggaatctgtctggtctttttgtagatagggaaaaagtctcttctascatctgttgatctctgatggggctttaattcaaaatacttataccagggagccatattttgtggtagaattccctgggctccttcagcctggaagacaaggcaggctttgctttttttctctctcttcctttagataattctaaatggcacatgcaatttagaaggaaggattttacttcaggctgttatcttctggacaattggaataggttctcagttccatctttcttggcatcatctacctctctctcaatctctctaggtcctgcagtaaaactagactacatgtaatctctgcacatactatctgtgctttcttacatgctttcttctgtttgcctctgtgtgtgtagttttgttgtttgttttagagatggggtctctgtggctcactgcagcctcagattcctaggctcaagtaatcctcccacctcagcctcctgagtagctaggactacaggcatgtgccaccatgcccagctaatttgttttatttatttttttttaagagacaaggtttcaccatttatctgggctggtctcaaactcytggctgtgtttgttttgtttaccgttatttagaattctctcctttccttctcatctttacacgtgatgaattcycttttaaatttggccagtttttaacctcttttttttttttttaaacttccctcgattttatctcactttgtctttcattcacatggtaccttctgttacagtcctttaaatattttgctttttctaattacaaaataaaacctcattataaataattcagacactagaaaagtaaaaagtaaaaaccgttctcattcccttttggtcccatgccttagttcataagaataaacaaacaggtgcttatcctttcagaatcaatatgtgtatgtatatgtgtgtccataagatttcaactgcatatgtagattttcattttttaatttcttaatatrtgtgtgtgtgtgtgtgtgtgtgtgtgtgtatatatatatatatatatatattcatgtgcatatagcttatatagaactgcagattgcttttttttaaagacttttttaagaatagtttttaggttcacaggaaaattgagaggaaggtacagacgtktccatataccccctaccctgacacacgcatagccacctccattatcggcatcacccaccagagtggtacagttattataattgatgagcctgcattcacacgcagtcccccaagttcatagtgtacatttgggttcattcctggtagtgtacattctgtgggtctgaacaaatgtataattatatttatccatcattatgatactatacagaggatttttagggcagtaaaaatactgtcctctgtcccctacctatttattccttctacacactgcttttggcaacagctgatctttttactgtcttcatagttttgcctttctagagtgttatacagctggaatcatactgctatggtccgaatgtttgtgcctctcaaaattcatgtggaaatcataaccgctaaagtgatggtattaagaggtaggtctttgggaggtgattaggtcaggagggtgtagcccttaggaatgagattagtgcccttctaaaagacaacccatagagctagttagtaccttctaccatgtgaggacacggtaagaagacagccatctgtgaaccagtaagtgggccttcagcagataccaaatctgttaatactgatcttggacttcccagtctccagaactgtgagaaattttgtgtgaaataaatttmtactgtttataagctacctaagccaggcatgtgtacctgtagtcccagctacttgggaggctgaggcaggtggattgcaygagcccaggagttcgaggtggtagtgagtgagctatgatcatgccactgcactccagcctgggtgacagagtgagaccctgtctctataaaacacacacacacagacaccccatattacatatatatgtaagctccccagtttatgggattttgttgtaggagcctgaacagactaagacacagtatgtagccttttcagattggctgttttcacttagtaatatgcatttcaggtttctcacggtctttttatggcttgatagctcatgtctttgtagcactgaacaattttccattgtctgtctgtggcacatacacataccgtatattgatgtaccacagtttatccattcacttaytaaaatacatcttgttgttttgaaattttggcaattatgaataaggcttctgtaaacatcctcgtgcagattttattatggacttagtcttcagctcctttgggtaaatatcgaggagtaccattgctgggtcatgttaagagtatgtttaattttgtaagaagctaccgaactatctttcaaagtggctgtaccattttgtctttcttcagcaatgagtgagagttccttttactttacatcctcaccagcatttagtgttctcaatgttctgtattctggccattctaatagatatgtagtagtatcatggttattttagtttgcattttcctgatgacatatgatgtggtacaacttcttatatgtttatttgttatctatatatctcctttgatgaggtgtctgttacggcctttggcacatttgtaattgagtttgttttcttattgtcgagctttaagagttctttggatattacggatgacagctctttatcagatatgtctgttgaaaatattttttcccaatctctgcctcgttgtcttattctcttgacattgaccttcacagagcagaaggttggttttttttttgtttgttttgtttttgagacaaagcctggctctatcacccaggctggagtgcagtggcacgatcttggctcgctgtaacctctgcctcctggattcaagtgattcttctgcctcagccacccgagtagctgagattaccgacgtgcaccaccatgcctagctaattttttgtatttttggtagagatggggtttcaccatgccgaccaggctggtcttgaactcctgacctcgtgatctgcctgcctcagcctccyaaagtgctgggattacaggcgtgagccaccacgcctggccagaagtttttaatattaatgaagtctaccttaccaattttttcttttgtgtatygtgcatttgatattgtctcaaagtcattgccattcctaaggtcatctaagttttctcctatgttatattctagttttatacatttgcattttacatttagatctgtaatctgttttgagttaatttttttgataggtataaagtctgtgtctagattaatttgcatgcagatgtcagttgtcatttgttaagactatttttgccccattgtattacctttgctcttttgtcaaagatcaattaactgtatttaattgggtctgtttctggactctctattctgttccattgatctatttgtcttttcttttaccaataccacatttttaaattggattattcttttcttatttgtatgtgttctttttacatagtggttaagaaccccttctatgttatatgctgtagtttcttctagcctgacttacttgatttaatgagcacttattacttaggtagtgaaatctttttcacatggctatcagcagctctagtctggaaattctttcatatcctgtaactgtgtggcttcagcatctagcaccatgtctggtatagattaagtattctataaatcgtttgcaatgaataatgtataagacctgacctttttcttcaaggaattaaagtctagtgtcacataaagtagtccagaatttaacaatgaggaagggaaaaaaaagcatagtatctaaattgcatattaaattatgtgttgtgcaacggaagacttatctattgggaaasttccctaaattagttcttctccctaaacattctattcctcattttctttttttatttacctctatactgaaagtgaattattttctattagcttaaaaatgaattttctatcagctataataggaatattttgtctgctttttttgagacagcttgctgagtttagtccaaatagtcttgtgttttctgttatacccaatttcaatttttaacktgaattctaattttttttcttgccatttcaggtaagaccatgaattatggcatttcttwaatgaagcgttcaagaagtgagagaatgtcatagaaaataaatgatttttaagttatgtctattaatctgactgtagatatatatatttacctccttagtaatgcaagaagtgtttgtgggaagcagagaagcaagcaactgtatttcttgttctcacctaagcattactggaggataagccacatcagtctacaaagaggttttcatacaaacataataagatgtaaatggaccaaaagtgaagcacattcttgcagtaagcactgttactctccaagcaaccatggtttacatattgggattttgaaacttagcacttctgctcccaagggacttacaaaagtgaacatttgtatgtcccgtattaaaagtactttgaactctgtttcaaaggctgtttttggcaatcaaaatgaaatgatttcacgtttagctcaatttaagccaagttcccaaattttaagaaaagtatcggatagtggctggttaaaacagaaaaacatcaaacaagccatcaaatctctgaaaaaatatagtgacaaatcagcagaaaagagtccttttccagaagagaaaagtcacattatagacaaagaagaagatataggtaaacgcagtctttttcattacacaagttctataaccacaaaatttggagactcattctactttttatcaaatcatattaattcatatttcaaacstaaggaaaaaatgtctcaacaaaaggaaaatgaacatttccgggacaaatcagaacttgaagataaaaaggtagaagaggggaaattaagatctccagatcctggcatcctggcttataagccaggctcagaatctgtacatacggtggacaagcctacaagtccttctgcgatacctgatgttcttcaagtttcaactaaacaragtattgctaactttctttctcgtccyacrgaaggtgtacaagctttagtaggtggttatattggtggacttgtccccaaattaaagtatgattcaaagagtcagtcagaagaacaggaagagcctgctaaaactgatcaggctgtcagcaaagacagaaatgcagaggagaaaaagcgtttatctcttcagcgagaaaaggcaagttgttcagtgtgcttttcggttctattactttttgtcaaatttataagttttatttcctaatgagaactaagaaactttcattgttctttagagcagttttgtattctaatcatatctatttaatatgtctttgtagattatcgcaagggtgagtattgataacaggacccgggcattagttcaggcattaagaagaacaactgacccaaagctctgcattactagggttgaagaactgacttttcatcttctagaatttcctgaaggaaaaggagtggctgtcaaggtaatttctaatttatttaatctagttttgtcttggaatagaagtactaaaaaaaatctaaaatggagaaggcaaagcctttcatttttccatttgaattttgtggtttttattatacatgtgatgtgtattcagtaattaccctatttattttgtgacatacattatgctaatcaattcattttattttgttagcaccaatatgtatactttgaaattaaacatttataaaatagaaaataatcagtttattagttgrattgcctaacagctgccagatttttctttagtgcaatgtaaatatttatactatgtaactgttcttttaagataggagacataattcatatgtgaggctgttgtttttatttcatggtcctttcgtatttgaaagtctaaaaatttgaatgaccttactcataattgaattagtaatcatattaagtaaaacaatgagcttttctttgcctcagttttttcaactataaaataatgaagataatttagacccacttaaatggactgttttcagagaagtgctataaaatatgactaatgtgattgagtctctttacatctatattattaagattatttgtaatatttaatgaaaaatttgaaaatatcataatgatagatactgcttacatttcattagaaatctattagtgcttatttttagcttggcattcagaaaattgttttaacttagaacacatttattctactttttaacaattaccttgttgaaaaattgtctttgaataatgtacccatccttacttgtgtattgtataacacatacattattataggtagcttcactattttatggtcctataatttgggattatattttatatttatataatcttacataaaagataagattctcaaatatacatatgcttttaagtatatttcacatttcagtgatatactgaaagcaaagatcttaaatagaattacatactggcttagtccatttgggctgtcataataaaataccttagcttgggtaatttataaacaacagaaatttatttctcatagttctggaggctgggcagtccaaaatcaaggcaccaacaatttgatgtctggtgagagtcccgttcctcctagacagcagcttctcatgacctacttagatggcagaaggggcaaggtggctcacttcaacctcttttacaaggccagttgtactactgatggatttctgagtagttttcagttgcagtttaaatagtcttgctaattgaaactctgaggactcttttatcttgcataactaatcccaaatctaaggacctttcaatactatgaaaaaatgtaatataggaatatatattcagatcaattatgaataaaaatctaggtagtctgaaaaaagttgtcacccttcccttaaataatcatctgaaaaacagtgaactggacaaattgcatataacgtgtcagcatgtacactctagtgtgaacttttccagctaaactttttgttattatcaagagttgagctttttaaaaatgatagaatttttataaaacatctgtatcaattttacttttttatgtgtctaccatatttaaggtagctaaatacagggaattatgtctgatacgtaatgccctaaaaaaaaatgagttacttattttgtatgctacatttatggcagccacatttagggaattgtctgtgataattttttcactgtgatgaaggtggtctcctttcattatgttttttaattaaaaagaagaactttgactgtttagaaagaaggcagcacaaagcattgtagggaattagaagaaagaaaagataagaaaataaaaataatatattttaccctcagattaccactgtaatgtattagagtttatttgtgttcattggattaagcttccttaagctctaatagcaaacaacaccgaaatctcagtgacttaacaaaacagttttatttctggctcatgcaaagttaactgtgggtttgggtgactctttggcacagtgaacctccgtgtggtggttacttagatcctgtcctgttgtctgtattttaattgagtcttcctctmtgatttctgtggcaaggaaataatatttcagcagaagttgccacgggtttcttctactcacaatctgtttatcctgtccgattgcatgggcctgaaaagtacaaccttctgtatgcttggaaggggaagcaaacagtgtattggtgaacattagtaatgtctgcacagtattcyttcagaaatyattctatgcacatatataccaaaataaactcattctgtatatgttgttttataatctggttttttagcatataatgtatacctttctatatcagtaaatgtccctttatcctgtacccagtttgaaaatgttatttatgtaactgattagatccaaatgagggttcagtctagatcacacattgcatctgactatttctccaagtcacttaaaatataacgcagtccttcagccacaccttcttcacctgcacctttaaaactgatttaattgaagacattaggctggttaacaggcagaaagactcgctttctggatgtacctgccttcttccttctcagtgttatttgaagtgttcctctttccttttcatttcctgaacactggaatttaaatataatggcttgattgagttaaacattttgttgttagagcacattgtaggtaatgtcatgtgcctcataatgcatcatatcaagacacacatgacaattagttgaacaaccattagtaatgctaaggatgaccaccgtgttaaagtgatgacaatctgcttctcattggacaattgtgctagaagcattatctcatcaaccattaacctaatcatttccagaactaataatttcattagagttgcagaatgaccaatgtctaattctgttactcctacattataattgacattcttctgtaaagaagagccttccttcatcaactgaagctatttgggtattctcaaaggcaaattttacaaattttacaggaaaggaaagagaaatgcttaatttatttgtatttagttaccagttttctttytttttttttttttttccaatttgagagcaggtactgtttattaaccaaccagcttagagaaatagtcatggtagacaccttagttcattcttctaataagcctgttgatctggtcctccctgttgccagcatctccaccttctacaaaatgggtggtctttttcttcattccacctcgtggagaagacaatttgaagggccacaggaagttatttgcctctttgaagcgttttccaacagtatagatctcatgaatcagatcctccatgcagatgatgccatatttaccaagagatcgagcaatcaaagcgttatctgtcaaagcaattcgcttcttattgattttgccataaccactcttgtagattagttcatttactgacttcagattggggkacccccatgcaatatatggctctacaatcctcagcatgttagtcgaagccttgttgagcttcacaaaggttccattgtagatttgaygaaggcgaagaagctgcaacacctttcggacctttgggctcacgccactgatacctctgattctgatgacaaatgccagtttgggttctgcaggtacaaagtagttgccagcttttcttgccatcctcgccattcgaatttcagttctgtacatctgcctatattccytgtgatagtgctttgctttttcatagataagcttcctccttgcctttcgaagcatcttttgggcaaacttctttctcaggcgcttsatcttcagctctgagaaattccttcgctttttcttaagggtttctggcacagcaggaaccttcttcttctcttctacacccaccatggttccagccggaaaaagagctagttaccggttttctttctttttttttttttttattatactttaagtyttagggtacatgtgcacattgtgcaggttagttacatatgtatacatgtgccatgctggtgcgctgcacccactaactcatcatctagcattaggtatatctcycaatgctatccctccccmctccccccacccyaccacagtccccagagtgtgatattccccttcstgtgtccgtgtgttctcattgttcaattcccayctatgagtgagaatatgcggtgtttggttttwtgttcttgcgatagtttactgagaatgatgatytccaatttcatccatgtccctacaaaggacatgaactcatcattttttatggctgcatagtattccatggtggatatgtgccacattttcttaatccagtctaycattgttggacatttgggttggttccaagtctttgctattgtgaataatgccgcaataaacatacgtgtgcatgtgtctttatagcagcatgatttatagtcatatgggtatatacccagtaatggaatggctgggtcaaatggtatttctagttctagatccctgaggaatcgccacactgacttccacaatggttgaactagtttacagtcccaccaacagtgtaaaagtgttcctatttctccacatcctctccagcacctgttgtttcctgactttttaatgatcgccattctaactggtgtgagatggtatctcattgtggttttgatttgcatttctctgatggccagtgatgatgagcattttttcatgtattttttggctgcataaatgtcttcttttgagaagtgtctgttcatgtcctttgcccactttttgatggggttgtttgtttttttcttgtaaatttgtttgagttcattgtagattctggatattagccctttgtcagatgagtaggttgcgaaaattttctcccattttgtaggttgcctgttcactctgatggtagtttcttttgctgtgcagaagctctttagtttaattagatcccatttgtcaattttgttttttgttgccattgcttttggtgttttggacatgaagtccttgaccatgcctatgtcctgaattgtaatgcctaggttttcttctagggtttttatggttttaggtctaacgtttaaatctttaatccatcttgaattgatttttgtataaggtgtaaggaagggatccagtttcagcttcctacatatggctagccagttttcccagcaccatttattaaatagggaatcctttccccattgcttgtttttctcaggtttgtcaaagatcagatagttgtaggtatgcggcgttatttctgagggctctgttctgttccattgatctatatctctgttttggtaccagtaccatgctgttttggttactgtagccttgtagtatagtttgaagccaggtagtgtgcttcctccagctttgttcttttggcttaggattgacttggcaatgtgggctcttttttggttccatatgaactttaaagtagttttttccaattctgtgaagaaagtcattggtagcttgatggggatggcattgaatctgtaaattaccttgggcagtatggccattttcacgatattgattcttcctacccatgagcatggaatgttcttccatttgtttgtatcctcttttatttccttgagcagtggtttgtagttctccttgaagaggtccttcacatcccttgtaagttggattcctaggtattttattctctttgaagcaattgtgaatgggagttcactcatgatttggctctctgtttgtctgttgttggtgtataagaatgcttgtgatttttgtacattgattttgtatcctgagactttgctgaagttgcttatcagcttaaggagattttgggctgagacaatggggttttctagatatacaatcatgtcgtctgcaaacagggacaatttgacttcctcttttcctaattgaataccctttatttccttctcctgcctaattgccctggccagaacttccaacactatgttgaataggagtggtgagagagggcatccctgtcttgtgccagttttcaaagggaatgcttccagtttttgcccattcagtatgatattggctgtgggtttgtcatagatagctcttattattttgaaatacgtcccatcaatacctaatttattgagagtttttagcatgaagggttgttgaattttgtcaaaggctttttctgcatctwttgagataatcatgtggtttttgtctttggctstgtttrtatgctggattacatttattgatttgcgtatattgaaccagccttgcatcccagggatgaagcccacttgatcatggtggataagttttttgatgtgctgctggattcggtttgccagtattttagttaccggttttcaaagtaaggtgttgctttaatagctgcctcagtgattaaatgaatttttttgcacctttaaaaaaaawattatggactccttgtttttctaagttaaatgtgtttctttttctttttttgggagacagagtctctgtcacccaggctggaatgcagtgccatagtcttcactcactgcaacttctgcctcccaggttcagcccagctcagcctcctgagtacctgggaccacaggcatgcacaaccacacccaactaatttttgtattttttgtggaaagagggtctcaccatgttgctcaggttgatcccgaattcttgggctcaagcaatctgcctgccttgcctcccaaagtactgagattataggtgtaagccacctcacccagcctgtttctttttttttttttttttttttttttgagacagagtcttactctgtcaccaggctggagtgcagtggtgtgatctcagctcactgcaacctccacctccggggttcaagggattctcctgcctcagcctcccgagtagctgggactacaggcgcccgccaccacgcccagctaatttttgtatctttagtagcgatggggtttcaccatgttggccaggatggtctcgatctcctgacctcaggtaatccacctgcctcggccgcccaaagtgctgggattacaggcgtgagccaccgctcccagcctcaccgagcctgtttctatgatctattttctccccttctcttttttaaaatgctgaatttgtcacaaggattcatacatcctttgggtttattaaaaaactttttataaaaatattatatatagagaacaacacaaatcgtaagtttacagttccatgatttttcacacatgaaatacatctatataaccaccaccctgaatgagaaacaatcttatgaacactccaaatactgttcccaaaaaggttgatcagtttttcagaattctagcagcataatttagttgtgcctctttttgcatgttctatgaattatacagcatgtgttcttatatgtctggttttttttttcactcaatattatgtttgtgagaaccttctatattgttgggtatacttttcatttttccctctattgctagacatttggatggtttgcagtttgggaatatttagtagtagtacttctgggttatatcttttggaaaacataggtcttcgtttctttggagtatatacctaagagtactattgctgctcacagagtgagcatatttgtaacgttagtagatactgccaaatggttttgcatagtgcttgtgscaatttattctttcaccagaattctatgaggcctctgtgttctactttctctccaacactttattttgtaattttttttttgagactgagtgtcgctctgttgtccaggctggagtgcagtggtgcgatctcggcttgctgcaacctccgcctcctgggttcaagcagttctcctgcctcagcctcccgagtagctgggattacaggtgcgcaccaccacaccctgctaatttttggttttttagtagagacggggtttcaccctgttggtcaggctggtctccaactcctgacctcaagtaatctgcccacttcggcctcccaaagtattgggattacagccgtgagccactgtgcccaacctttttaaatctttttaatttgagcagttttgttgggtgttaagtgatactaaattatggttttaattttttatttcattgatagctatgatattcagcatcttttccagggtttattggccatgtttatacttccttgtgaagtaccyattccagatcttgcctatttttccattgggttcaccaactttttcttcattatttgtagaattttaaaaatatattacggttgtaactcacttgtcatatgtgcggtrtgtatgtgtatgtcttacaaatcgttctcctattccgtggctgaccttctcactcttgtgttttttgatgaacagatattcttaattttgtccaatttataaatacttttctttatagttagtattttgtgtcctgtttaagaaatctttgcctatcctaaagtcataaaagtatttttggccaggcgccgtggctcaggcctctaatcctagcacttcgggaggctgaggtgggcagatcacgagatcaagcgatcaagaccatcctggccaacrtggtgaaacctcgtctctactaaamatacaaaaattagctgggcttggtggcgtgcgcctgtagttccagctacttgggaggctgaggcaggagaatggcttgaacctgggaggcggaggttgcggtragctgagatcacgccgctgcactccagcctggcaacagagtgagactccgtctcaaaaaaaaaaaaaaaaaaaaaaaaaaaaatatatatatatatatatatatatatatatatatatatatatatatatatataaattttcttgtgttttcttctgaaaccttgctttgccttttactcttctatctagtattcatctagaakagattkggttgtgtggtgtgtgtcagaagtcctgacttttaaaaaatacacttatccagttgactcagcaccatttattgaaaagacctttatcataaatgagatgtatatatggatctgtttctagacacagtatttttcatttatgtattttttgagatggagtttcgctcttgttgcccaggctggagtgcaatgtgcaatcttggctcaccacaacctctgcctcccaggttaaaatgattctcctgcctcagcctccctagtagctgggattacaggcatgcaccaccatgcccagctagttttgtatttttagtagagatggggtttccccatgttggtcaggctggtctcgaactcccaacctcaggtgatccacccacctcggcttcccaaagtgctgggattacaggcgtgagtcaccatgcccagccagacacagtattttgttccactggtatatttgtgtgtggttgtgctgatagtgcactggctcaatttttgcagctgtataaacctaggtagtataaatcctccaaccttgttcttctyaatgttgttggcatggctattcttgacatgttatatttctatatgaattttagaatcaccttatctacaaaaaaatttttaaaagagaaaaacatggtgggattgcagtgaatatgtggaacaatttagggtgaattgggtctttgttgagtttccaagccatgacatatggcatattttttcaattattcgggtcatctttattttcctcctgtgttttaaaaattttcagtgttgggtgtsttttacatcttccattggaatgattttatttaactaattcataggtatctgatatattttgataattttattttgttatttttatttcaacatgtttttgtggtaattctaatatgaacatcaattcttggtttttgtaattcggtactggattcacatacgttatagtttttctggatgctggacattgtaagtttaaaaaattgcataagctctagattatatcaaattatatctttttctggggtttatttgttcttctgtttggcatttgagtggagccctgatagccttaattcagttagggtcaaatctggatcaaggctgtattacagtttgggtaagacctctagtttgccctgatttttgggcatattcttccagggtgtgttcacttaaccaccatctcattgggtcctaaaatctcaagaatacaaagccttccactctgattttcagaggtcttcggcttaccttttgcyttccacacctcatgattttagaattcagcaaatgtcttgaggtaaagccaaccatgtgtttgaagcccttcaggtcttccatttttttcactccaaaccccttagatgctaaacgatcagctggtttctctgtcctttatttggggccctctgtctgagtcagactcacttttttggtcctttactttttcctggaatcagcaaatgcctcaagggaagaaaagctatagtttaccagctcacttcctagcaattactccttctccagattcttggctccatctgttcttgttgcttcagcagctctctgtctgatgcctttaaacagatggtacttttcttgtatttcatcaagattttcttgttgttgatgtgagcgttgatctgtaacagagtatttcatcttaaccggaaatggaaatttgcattattctccaccattgctcaagttcctctagtggggcctcacagctcaatattaggggaaaaaatattgagaaagaatttagagtatttcaggttgattgatcataaaaaagaaacaaaatgagtgatacctaggaaaattrtttgatttacagaaggttgcacagcagaattatagctgccactcagccattccattaaacctgcggtactgactatgtaagatgcttctgtgtacagaagctagagaatctttggtaagcaacatagaactctaggatttaagctcttgtctgtgatcaacaatatgatgttgagtgcttagaatcttgaagtctcaggtttatttaaactgattatttaattgtagtggcctgcttttaccttctcacctcagttacctttgttaacatttgtttgtattcttttatgaggcaaccttgaatcccatatgcaatgtatacaagatggttcattatttctttttaataacagtttaacttctagtagttactgtgaatcagttttagcctcttaatctcaggatttggactaaatattatacaaaatttataatgttaaccttttgttataataatttgtaaatttctataaattatattttctctagttaagtattacatcttttaatgaaaacttttgaatattggttaatttttgtcctcaatattagaacaaatgtaatctagaaaattgacattaatatatcaaaaactaatctgtcttataagattactgagaaagtaatgaacactgtcaccttggttgtcatgtggtgaactgcatgtattggttaataataatcatacattttcagtcttgatttgacaaaagcaacaaagtatcttttctctcaatataggaaagaattattccatatttattacgactgagacaaattaaggatgaaactcttcaggctgcagttagagaaattttggccctaattggctatgtggatccagtgaaagggagaggaatccgaattctctcaattgatggtggaggaacaaggtaaggctaggaacaygattctttttttttttttttttttttttttttgagatggagtttccctctgttgcccaggctggagtgcagtggcacaatctcagctcactgcaacctctgcctcccaggttcaagcgattctcctgcctcaccctctcaagtagctggatttacaggctcccgccaccatacccggctaatttttgtagttttagtggagacagggtttcaccatattggccaggttggtctcaaactcctgacgccaggtgatctgcctgccttggcctcccaaagtgctaggattacaggcgcgagccactgcgcccagctggaacatgattcttaaaaactacagattcaattcagctttaggaattaaaaaaaaaaagatttgatataaataaaatcaaatttttaaaataaaacatgaaattgttttaattaatactttattaatctaagtgctactctgacatatacttcagttctttggtttgatttggtatttatatttttgtatttgatttgatttgattttagtatttatatttttatatttggcctttttagacctttttggtagttcagaagcttatcaaccattattctcataaaaccttgacagtgttttataattttagctttcatttattattttatttttttggagacagagtcttgctctgtcgcccaggctggagtgcagtggtgcgatctcagatcactgcaacctctgcctcccaagttcaagcgattctcctgtctcagtctccgaagcagctgggattataggtgtccaccaccatgcctggctaattttttgtgttgtaagtagagacgggatttcaccatgttgtctaggctggtcttgaactcctgacctcaggtaaaccacctgccttggcctcccaaagtgctgtgattacaggcgtgagccaccgcgcccagccagctttcttttattacacttatcttacccatatatatcaactagttacttgataaagtgatggttacaaaatgaggctatattaacttcctgacttctgatgtcttcacttggagatgccagttctggtgccatataagaaataaattctttctttgttcagaaggagataatttcactattaagctctatttttactactggcaatccatccatgcttcctactcagtctttgtttatctagttccttccaacttgttggttagattttttggcttggtttttcaaaccttttccccaaaatcttctagcttgttctctagttccctgccatctctactgttaccttgtaattcatagtacatgccctgcctattgttcttaggtttagcttacctctctgattttgctttttggtataaccaacttgccaaccactcttctgtatgttcaagtactaccctgtatctttttgttaaattccttggttctgtattcacccgagtcctttatactttgacatcaatatgaaggaaggaataagtactgagagaaggaagctaacctcagatggtggcagtggaaggcaggaggaaggaaaaatgtaccagtaactttttttttttttgagacggagttttgctctggttgtccgggctggagtgcagtgacgtgatctcggctcactgcaacctccacctcccaggttcaactgatcagttctcctgctgtagcctccccaagtagctgggattataggcatgcactaccacacccagctacttttgtatttttagtagagacggggtttcaccatgttggcaaggctggtctcaagctcctgacctcaggtgatccacccgccttggcctcccaaagtgctgggattacaggtgtgagccaccatgccaatatcagtaacttttaagaaactcggagacaggatatggtagacataggtcaagatcactctaacagtaaacctgtgtgtgactgggacaaaactgcagggaatctcaacagattggtgttgaggaaagacagttctttcttgaacatatttaatataagattatatccatacagaagtgctcggttggcaaaagcccactgaagagagaaaaatctttaaagatcttagaggctatttctcaggaaagtgaaataatcttaagaaagtgtatgtcattcatgtgatacagataaagtgataactggagagattattctagttcatagaattggttccaaatggtgaaaaatagggaaaatggcagttaaatgagtaggggcatttcactaaggagcagaaggaatcctctctgccataatgttcaggggagttgggacaggtagtgtcattcattgagtcagctaacaaatattgggggcctactatgttgtaagcactgatttagatcctggggacagtgagcaaacaaaacaatacagtgtttgcattgtagagaaggaaaagacaacaaatagaaaaacaaaaatatgttattctgggtgctatgaagaaaaataaagcaaagtaaagggatagagaggaagagtactattttaaagaatgctcaggaccaagacttctttttaaagaagttatatttatgtagagataggaaggaaggaagaaaattgaagaacattcacatgtctaaggtcagacaagcatgatgaaaaagaagtttgtatccaataaatagtttatcttgtagaataagagttgtattagtcatatagggaggaaatcagtgtgaggtaatttgggaaaatctaggggtgggttaggatgaagttaggtttaggttagtaattctccactggaggtgattttgctccctaaaggacatttggcagtgtctggagacatttttagttgtcacaactagagcactgccacttgcatctagtttgaagaggacagttgtgactaaacatcatacagtgcacaggacagccccgcaaaacaaagattatccaacccagaatgtcagcggttctgctgttgagaaaacttggtttaggggaatatgggaaagcagcccagatgggaggtttgtgcggaaagcagtaatgtatgagggattgagagaaaaaataaaaaaccctgtctttgacttctttgttataagagaacctacagtggtagacacagacagctgtggcaacttggcagatatatacgtatttaaattcattcggaatttatgagtacaacatttttaaatagttaagtttcccrattatacgagtagttagaaaaacctgagagagaaaaaaaccccaaaaccatagctcacaactcttaagattattttagtattttgatttattttcttctaatctttttctgtgtgaacatatacgtgcctattttatttcctttttgtgataatagaggtcacattgttaaatatattttatccagcattacatttaattcatcatgtcttgtcttgaattaataatgtacctctttcataagatatcttaactctcctcaaatgcacattatttgttgtatttaaaaaatcagcatctttggttttctactttaatcttacataattttctagttacttcttgttaacattatcaaggcacaatttgacactcaaaattttttgatgcctaactacctttgtgttccaggayttacctaccccctaccttgtgttgggaatagagcttttcatygtttttttattctcccactgttaaaaattgtcatgatacacacatgacagtttacatggtacatacaccctcaattggtctatatctcctaagctttttcatcgtttcgcattccttcatgaagctattaactgctgttggcaaggattcagaaatgagcaaagtcagcaacattaattaatataccattaatatagagggttaacctgaagttattgagagtttttaaaaatgaataaagaaaagggagcttaaaaatctgactggtggccgggtgcagtggctcacacctgtaatcttagcactttgggaggctgaggcgggtggatcatgaggtcaggagatcgagaccatcctggctaacatggtgaaaccctgtctctactaaaaatacaaaaaaaaaaaaaaattagccaggcatggtggcaggctcctgtagtcccagctactcgggaggctgaggcaggagaatggcatgaacccaggaggcggaggttgcagtgagcccagtgagccactgcactccagcctgggcaacagagtgagactccatctcaaaaaaaaaaatctggtgaaatatgtaagacaaaaatgtatagagtcataggtgaccaactatgttagtaagagaggaaaccaaggtatggcattccaaaaccagtgagtgagtttttaagtgttttccagttttttttgtttttttttttgttttttgttttttttttcaattttatattggcatatctttgtattcttatttagttgtttgttggtttttggcattcttaagaagtgtatttgagtggatttcttcttctttttactttttttttttttttctgtagaaatgggatctcgctatattgttcagctggtcttgaactcctggcctcaagtgatcctcttacctcaacctcccaaagcgctgggattacaagaatgagccactgcctggccagatttattcttaaagagatactgttctgcagaaggatgggttcagtgaaaaaacaagagagagatactaatataaattttaaaatgtgctgccttagtgtaggtttttttatcatttagatattagattttcaaaagtaatactaaaaatttggacaggcaatttttactgattttgatttatattattaattttcatgttagcatataaactctaaaagcaattattagattgttttattcaacagcttaaattattttttctttaaacaggaattgtcattttgtctttaatcttttctgtaggggcgtggttgctctccagaccctacgaaaattagttgaacttactcagaagccagttcatcagctctttgattacatttgtggtgtaagcacaggtaattattattatatggaagtggtgcattctggcagtacattaaggaaaagaacattaagcacttatgtttaagatcatagtcctttgccttcttcagccctctctccataccccaaaattttgtacttccttttttgtcttttgttcatggttatgccagttaggcacactaggtggcagtgtgtcctacctattatagctagatatggaatcagctgtttaaaaggacatccaagagtacctaatatgtttaattacattggttcctaggactaacttgaaggagaattgcttagtgatttggtgagttgtcaaatataccatattctgtgactaaaactaagtaattcattgatgttagaaagaacgtgaattatctaccatagtatcttatatataatttaatgtaaaacaacacatttgtaaatatttttaaattattattattatcattattgggggtagcatttatttaatcctttttgagacctggtaaatccctttacatttgttaacccagtaagacacatgaattttggttgttcttattactcccattttacccctgaaacaaatggggctctgagaaggaaagtcatttgtcccaggtgacatagctagaaagtatcaacgctaaaatttaagccaaaactatgattcaggaaatcttatcatcataagggctataacttaacactgataaaagctaaggattcttttttccaggtgccatattagctttcatgttggggttgtttcatatgcccttggatgaatgtgaggaactttatcgaaaattaggatcagatgtattttcacaaaatgtcattgttggaacagtaaaaatgagttggagccatgcattttatgacagtcaaacatgggaaracattcttaagtaagttacaattactctttttaaatcttctgattatataggtagtatgtgcatattataatttgaaaaatgtcaatattaaattatattcttgcatattataatttgaaaaatatcaagaatattaaattatttgactaattagagataaccactgttagtattttggtgaatcatagtttagtaattgttttggggggtttgtgtgtgtgagatttgcatgtaaaagttgcaattgccttttttaaaaatatgagatacttgcatcctgttgtttttacttaacatattaaatgtgtctcaagtcattctaaaatattcaattatttttatttttatttgtttttcgacacacgctctcactcccgttgcccagggtagagtacagtggtgctatcttggctcactgcagcctcaacttcccaggctcaagtgatcctcccacgtcagcctcccaagtagctgggaccacacgtgtgcaccaccatgcccagctaattttttctgtttttagtagagagaagatttcaccatgttgctcaggctcctaacctcaagtgattggcctgcctcccaaagtatatataatcataaaatataagcataaaatcatccacaatcctgttattcagagctgtagactttaatatatctccttctagtttattagaccttatacattttgtatagctgatattagattgtagttgtaaattcgtatccttctccttttttcaaacgttcttaaaatctcctgacatatttttaaagactacactgtactccagagtgggatgttacactttcttaatcatttccatttaggatttttatggacatttacgacatttatgttcctaattttttgggattatgaacaatgctgtcatagaaaactttaaatttcttctcacatttcagaatatatyagtaggtcactatataagaagcatatttattgggtccaatgttgatgtcttcttaaaataattattatataggaaatagaaaatatatcgagaaaacaataaaaataatttataatcccactaagaacaaaagcactattaacatggtgatgtgttttttgtgtaatttcttacagatagacaagtgtatatgtgtgtagttgtgagtgtgtgtgtatccattctctttacaaaattcagataatgcacagattatttcctatgtcagttaatattttttgaaacatatattaatggttcttcaccattttatggatatactgttttttatttaacaaatcctctcttagaaaaggatacttcagatactcttgcagttcaaaataaaatttagataaacatctttacttaaatctctggctatatctttaagtaaagtaaatttctagaagtaaaattgtgggccagaggatatgcatgttttaagaatcttgatacatacatggctgaatttgttctkcaatacagtggttttagcttattcatctgccaacatcaatttgtatttctatttcatgaaatatttgtgaacaccaaacacttaatttttaaaatgacatcagtttgagagattttgaagctcatgtttcaatttgtatcactttcattattgatgagtttaaacttaaaaaaaggttttggtttttgatggctttttattttttgtgtgtgaattttgagggcataatttttgcctattttcttatgggatattcctcaatgtattgtaaatatattaaccatatattgaaaaagtgctaataattttttaatgtagaggattgaaacatcttcatttagccaaatcttttcctttaatgatttttaacttttatgtttttaagtcttttctacaatcctactactgggcatatacccaaaggaaaataattcattctgtcaaaaagacacatgcactyatgtgttcattatagcactgttcacaatggcagatacatggaatcaacctaggtaggtgcccatcaacagtggattggataaagaaaatgtggcacatatgcattgtggaatactatgcagttataaaaaaaaatcatgtcctttgcagcaacgtggttggagctggaggccattagaataagcaacctaacacaagaacataaaaccaaataccacatcttcttacttataagtgagagctaaacattgaatatacatgaacataaggatgggaacaattgatgctggggaccattagacaggagggagagtgggagtgtgagctgaggagccgcttgttgggtactgtgcttactgcctgggtaataggattgttgggaccccaagcctcagtgtcacacagtttacccatgtaacaaaacctgcatgcatactctttatactaaaagtttaaatttaaaaataaataaataagtcttttctactctgaaggtrggtaaatatttgtattatttcctagttctaaagttttcagtttatatgtaattctgaagttacctaaaacttattttgatatgtgttgtaagagaatcaagcttttttttaatcagatgttaatccaaatgtcccagctccatttatttaactgatttgaaacatcatctttatcatatttgaaattcttatctatattagaatctgtgttcaagtttttggtttctctgtggatttattttcgtacaaattctgtagatttagttgttgaaccttggcataatatttttataatgatacagcatagcaaatcttttctcattattcttttacacaattttcatttaattttcaaagttaatcttaggctacttttatcacataaaaaaaaattccactggtatttggatggaaattacatgaaatgtatcacttattttgtggaacattgacatctttccaatcgtgaaagcttcccatccattatcattgtatgttacttattttcacatcttttgtgtcaattagaaaatataattcaccttcctggcctacacggtgaaaccccatctctactaaaaataccaaaaaaaaaaaaaaaaaaaaaaaaaaagccaggcatgggggcgggcgcctgtagtcccagctactggggaggctgaggcaggagaatggtgtgaacctgggaggtggagcttgcagtgagctgagaccactgcactccagtctgggcgacagagcgagactccgtctcaaaaaatatatatatataaaattcatatctattcccagtattcatacaatcaatactttttattatttaatgaaaatttaaaaatttattctaaaaccagcttctctactatgaaatttttccttttgttacttatgagagtatctttgcatatttatgtattgctgtctcatttttgctcttctggcaacttctttatttttaatcatggcattgataaattttatcagtgtcgttagttgttttttctttctctgctttttcaaactcagcctttgctgcagaacaagccactccaaaacttagtggcttaaaacaatgatgatttagtctcatgactctgtggtttgactgggtgtttcttctgttcttgccggagctcacttggtggctctaccaatgggcctgggaagcctctctctccacctggtcattctcacccaagcttcgtctcatcattgtggtttcagagttcccagagagcaagccccagtgcataagcacttatcaagcctcagtttaatggcatgtttgttgaggtcacatggacgaaagccatgccaaccaagagtctgtataggaagagactgtatacaatgacatggataccaggactgtgattcactgggtgccagtattgttaatattcttctatatctaccttctggccttttttgtcgtagcattttttcgcccattgtttattgagaggacttttatttatttatttattttgctgtgataattttgtgttattttaagggaactattttatgccatcagtagaatctaggcatgttgatttttttttcatattttgacatctcggaaataaacaattaccattgctttttttacaagtttatattcataagtgaattcactaaaagcattttaggttttgakaaaaccaagatttaaacaaatataaaaataaataaatatgaactttgccaaaaagtgtgaaatcagcatgctcctaggatttctcttgtaattttacagtaagaattctgtgaaaagacaaagaaccttaaaaagataaaatgcattgatctttatgtagtagaaatgtatagatcaggttgggaaagacaaaagatcttgtccattttggaaagtattttacattgatatttattaaagcttataaagggtagatcactgagcagtttgtaaatattctttttatgaagttcactaatattctagttgggaaacatgagtattgtttgaaaaacacattagaaaatggttttactcatgaggaaggctggtgaaaccatagtctttgtattcaatatagggaaaatacataatttttaagtctggaaaagtctgcattgaaataaaattctcttattatggaattgcaaaaattgctgcccaaggacaatttctgtaatgtcatagtaattyaaatgccaactctgatgattttcaaagccattttcttgatracattggctgttaccaactaaaacaagcttaaagtctcattgtcctcacctggttactctaactagcccgtgcatacttctgcagtcttatctcaacacagctcctttatcctattggcaggaccctgaaaacaacagatttattttgcctttgtgcctttaatctgtatatgtcctagctttaaatatgttgccttgcagtctttcaatgtcttcctccagcaaccttcctgcatcttttccagttactgcccctctgttcgttgctccacctcagaactgtagatacttgcagtttgaatcagaggttgataaataactgcatattgtttcatgtgcattaatggaattataagcctcctagaggagagtcttacatgttttccttcatagcactttgacaaagccatggacaaatagtaattgcatactgtatgtttcctggttgttaggagataaagtcattttgatataacttatttttttctcctttaataaagggataggatgggatctgcactgatgattgaaacagcaagaaaccccacatgtcctaaggtaagcttagagtctcttaaatataacacctagttccatctgaaggtctggtgaaagcacttgtcctgagggccattttattttattttatttttattttttgagacagagtttcactcttattgcccaggctggagtgcaatagcacgatctcggctcaccataacctccgtctcccaggttcaagtgattctcctgcctcagcctcccaagtagctgggattacaggcatgcaccaccacgcctggctaatttttttgtatttttagtagagacagggtttcttcatgttggtcaggctggtctcaaactcccaaactcaggtgatctgcccgccttggcctcccaaagtgctgggattacaggcatgagycatcgtgcccggccctgagggcccttttattaaggtattacagattgtattaattctttatatattgagtcattctatgaagagatgggatatcatccttataccttttataaattcggtaaaactataccagaaatggaagaacatgaaagatggactgaaaataagaattatttcatcataattttaaaaatcaaatctagtgatttaaggaacattatgacattttttaccctagtttttttttttttttgagacggagtcttgctctgtcgcccaggctggagtgcagtggcacaatctcggctcactgcaagctccgcctcccgggctcacgccattctcctgcctcagcctcccaagtagctgggactataggcagccgccaccacgcccggctaattttttgtattttttagtagagacagggtttcaccatgttagccaggatagtctcgatctcctgacctcgtgattcgcccacctcagcctcccaaagtgctgggattacgggcgtgagccaccgcgcccagccttcttaccctagatttttaaagagaaattttatatgcctcttagatacaatacaatcatgcatcacttaatgatagggatacattctgagaagtgtgtcattagattattttgtcattgtgcaagtattatagagtgtacttagacatacttagatggtatagcctactacacatgtaggctaaatggtatagcctatagttcctaggctataaacctgtgttatagagtgtacttagacatacttagatggtatagcctactacacatgtaggctaaatggtatagcctatagttcctaggctataaacctgtacagcaggtgactatactgaatactgtaggcaattgtgacacaatgataagaatacttacgtatctacagatatacaaatatctagataaaaaatatctatagaaagatacagtgaaaaatacagcatagaagcccgtttatagtcttatgggaccactgttgtatatgcggtccatcattgaccaaaacattgatatgcaatgcatgactatattagattatattattatamaaattgaatccccattaaaattgtaatgtcacttagatgtgtctcaatgtggctcttcatttatttgtgtgtttgaaacccaatgatctgagtgttgcttgagttctgtttaatattacttgtttaaagaatagaatttatgtgcctagaaatttcatgcagcttgtatttattctcagataacraactgtaaccatgaaaaatcaaacaagtgcagctctttctgttgctcttaactatggcatactcatactttgattcattctgcaagtattaattatacacccactgctaggcactttggattcatttgtgggcaaatgcagacatggggttcacagctctgtagggcaacataggtattaatgaaataatcacacagatgacatgtagtagtttccctgaaatacataagtgctatggagcataaaagcagttctttgaaagcatatttttaaagagacatgagggccagctaatttaaggaagtgagatttgagatgtcaatgtgaagrccattgagtagcagcattcctggcaaagggaatggcctgtgcaggaagagttatagagaattccaggaaatgatagagttcttaaagattagtgcctcggaatccaagggctgcatgtggaatgaggctggagcagtaggccgattagatcagacgcagggcctcagaggctgtgatgaagagatgacttagctctttttgagaggacactagggtgcactctatgcttcttgcttgttcccctgtatctccaaggctccttgtttgtttgcttggtttaaattatgaagttgtcagttttgaataaaagttatggggaactttagccatcttaagaagtaaatcatcatgataaatggagagccactcatatgttttcttaatccaaccatatttatatgccaactatagaaagactctggattttagtatatggccaacgcctatccatagtggcctagagacagacttggattactcacaggaatttggcatgtgacctttgtttattaaatatcaaaacaattggcaggacttggcacaggacactaactttggcctcatcratacctgtcagcctcttaagtttgtattacagatcattaataaaacagcacatttcatgtaaatttaactgacagtgataaaatttgagacctgagatggttgacattatagttttttaataaacattacccaactaccaggttttaataattgtgacctgaaagcattgattgtgtagtgttacatttcagagttattgaagtcaaaatactttcaaagagcacagaaacaaagactaatttgtaagtgatattatgaaaatagtgtgcttatcttgaagcagttttttttgtttgttttgagacagagtcccactcttgtcacccaggctggagtgcagtgacgtgatctcggctcactccaacccccacctcctgggcaagcaattctcctgcctcagcctcccgagtagctggaaggcacctgccatcatgtccagctaattttgtatttttagttgagttggggtttcaccattttgggcaggctgctcttgagctccttacctcaagtgatccaccctcctcggcctcccaaagtgctgggattactggcgtgagccactgtgcccagcctttaagcagtttttattcattactactgttttgtcaattattatgtaaaggtctagaaatgtttgcctttttgaatatttttttaatcaaattgagtaatggtcaaataaatctcttttattattattctcataataaatttctcagaattgcttcagtctttatatctattatcccacaaagaaatgcctgtttaaaaagatctgattctcttttttcagcattatatttgttacacatatagttgtagattgttcattcatactactaaatagtatttaatttttacagatcccaaatatattactgttaatgatggaattgttcactttttcattcactaggtagctgctgtaagtaccatagtaaatagagggataacacccaaagcttttgtgttcagaaactatggtcattttcctggaatcaactctcattatttgggaggctgtcagtataaaatgtggcaggccattagagcctcatctgctgctccaggctactttgcagaatatgcattgggaaatgatcttcatcaagtaagttgacttgtatgtcttatttttttaaattttacatgattaaaagaatcagcacttattaaatgtcattgatcttcagaaggatcaacctaggagactttcttctttgtgtcttcatatctcaaaagaagaacaatttaggatatttttatttgttgtttttcttaacaagcctctgacatgcaaacatattttaagaaagtttttgtgttttatatagtgtgattcgtagcccattatgataattttatgatggaaaagtgagagtatgtatgattagctttccaaacatgataaaaagtaaaaacgatatacactccctgaaaatgcagaacccagtctgcttgacagtttgggtgggcatattttgaagaaagggatacagtaaaataatagtaaatactcattaagttagctgtgtgccagacacttatttagtgctgtgcatgcattatctcatttaatccttgctacttacgaggtagagttatttccattttacaaacaaggaattcgcaccttaggaaaagttaagtaactggactagcatcacagctgttaagttacagagttaggatgttgtccgtaattatactcttttaaattcatgtgtacactatctgtaaaagtgaatattatttctggaaattctttttatgtaaactcatttatgcttttcctctgtcaagtttttccaactctttatggaaatcttaattcataacttacactaaatgctaataaagctttagagctgatactttgaaagcttgcatttttatatataattttttatattatgtctcatttaaaattagtctcatttgatggagtagaatgagaggaatcttgacgtttttctctagtccctaaagtacgtctactctctttatttggtcagatatctgttgagaaaaaaatcttacgctgttgacagagatattaagacggcattcaaaaactcatacatagatctatataaacaacatgtcagcaatataaacttcaaaactttctaatggatcatttaaactaaaacatttttatcaattttatctcattttgatacaatagcttatatatattttaaaatgttatggycagctattcctattttctttttaatctttaagtaatataatatttgtagttaagagattaaaataggattcctttgtctttggagtcagttcaaaccatttcttactttgcagaatcagtcattgttgaattatttaaggcacttccccttcttgcctttcttctctttcttccacccactctgggcagaaagtactggctgctgagtttctgatactgatttcaggacttattggtcaaaataaaatttttattttaatatgtggcttactatttttaacaacgatttcccctattcttatgtaccatgtcataaattgagaaataatttagacagtgtatgtaaaatataatagaatttttaagttataaccttaatagtgctacaaacttgsagttatgccaattagtgaaagtctcaaataytaaataattacatttggggatcttgtgttttccacacttcaaaagaagttatttcatttgctctttattctttayccaaaagaaagtagttctaaagtttaattcagtactgttgaatatatattaccaaagtaattcagtggttccttttccatttcagatagattagtgatatttctgttcacgcttagacatttttatattgatgaccgtaatcctttaacttattttgagccacagattaaaataacttcttaaggttatttgaataaataaatgttatttataatttacataaatttttatgtaaagcatattgccacatgggcaaaaaatgtactttcatataaatcaataagcttcagaaactttggcacatttaattaataaaaatattaaaatggaatctagagcctaagaaacctacttaaggaaatatttttcttactctgtattctcttccaagacttgaagaagaaatgggatatttttcacttcaaatgacaactcagaagattgatgggaatattttaaggtgtgaatgatcttggttgcttaaacaaagaaaacgttcaagtaaagtcctaattctttctaaccactcagaagttttgccaagtttaaagtatagtactacaaccttctcatcctaaattcttttaataattatattcaattattaccagtctcattttgaaaatcccttttagctgtcacatctgacatatgttttaatgtagttacttggtatccattgtagtagaggttaattaatattctatttgagcaattattgaaagtagtgatataattaagagttatgtgtaggtgaatggggagattcatttgcctttgactataagaagaagattattacaacatttataaggttcattacaagtcctagaaaattataaagtgagaagaattctttgtgagtagctcccaatctctccctatctgcccaagtagtagcataatatgtacatggaagtactactttttaaacaaaattattccttctctctttccatctccaccttcaaaattaaattgttcattcctgtctttggagaaagaatctgataaattagtttacactagaggttttgatgaccaattctgatatacatattattcctaccaggctttatttacatcayaaaagtttttgttcagagcttaggatacataaacataaataaattatgaaatttttatttaaacattccaggtaaagagtgtttttagcagaaagagcctccccaacacctgccaaattatgcctataccaaaccacaattaataattttcattataactggacagaaatgtagtgagtgcttactcagtgttaggcactgtgctagctgggaaggatataaagatttttaaccatagttggcatattgtttgtgcttcctggatcctgccctcaaatagttcagacaaaaagaatgtaaacccagttatagaatgaggtaaaaatttaatcatcaatatatgtacaggattaagaagtactatagaggtgatttattctgtcagggtcagcttaacaaagaagttgtcatctgacttgatgtataaaaaatgggtcattgattagggatagaaaatgggatgaggaaggaaaaatggggagtgattccttaatggttacagagtgtgggtgataaaaatgtttggaaatagattgtagtgctgagatacagtggcttacacctgtaatcccagcactttgggaggttgaggctggaggatmgcttgagctcaggagttcaagaccagcctgctgcaacaaagtgagaccctgtctctaccaaaaaaagaaaaaatattaacaggatgtggtctacaggaactaccatggacctaatattagcccaatgacctactgatagaatagccatctgacaagagtaggctaactataagcagagcttaaaagatagtatgyttcaccactagattagagtgagcccagaaaccttaactgctgtacttttttgataaaaagtgagtaaagttgaaggaacagaaatttgctttgaaaaatggttagcacaactacaggaaacctgccagttttttgatttgggattgattttgcagttatcrtttcttgctaaaatttgtttgcctcttcatcttttcccttttttgtcttttctgatcatccttatataggcttttatataatgaaaatgtgtttcrtctaaaatacctacttgattagaagttacacagagtataacaaatataaaatttaaggtttaaatggtttagtaaaaaaataacttttctgccaaattagaaattaaatgttacctctgttgtgggataagtatcattctaatgatctgttaattgaaaacaaaggaaaaagttgaaaggattaagttaaaatttgtacttgagaaggcctttaggaaatagcytaattattaccacctgcattgaaggaatctaagtagatttttacaaagctcagcaatacaaatataaatacctatccaatttatgactttcaacaaatgtataaagatagctaaatttaaaaatagttcttttcaactggtgaatggataaactatggtatattcaaacaatgaaatattactcarcaataaaaaggaatgaattactgacattcacagagacatagatgaatctcacaagcattcttctaagtaaaagaaaccagacccaaaaaaacttacactatatgattccatttattttgataacgaagttcaatgcgtgactttgaagagtagttgratgaataggtttttgaagtaaatgtggcaacaaaccacccatgctaaaatggagaatagagcaagcaatagaaagacgtggcaaactgcttttctgaacgtcaacacagccctgtatatcccagttatctcaagggtatcacaaagctacacattggtgataaatgacatttgccataataaaggtctgttagcctcagactggctattctataactaaagagccaattaactttctctgggaagtgttgttagtatttaggaacatttctatatattaatagttgcctcctaatgtgatcttattgatccaaccagagtattatttgggatacaagtttttgagaaagttattttataatgccagaaatgaagagttatcataatctgtggtttgcaaaatactaccactccctctaaaataactgagcataaatttgtgaaaagatgaagagtgttcttcacatttcatgagaaattttagtaacagtagtatgcttcattagtagggcaaaatcctacatgatgttcttaatgggacctttaagccagagcaccaatggtgggggtagttgattttccacaaagaaaactacttgggagaatcaattatattcctatatacaagcaaakaataattggaaaccaaaattgtaacaaaagcagtacagtttacagtagatccaaaaaattaaacacttagatataaatctgacaaaacatagggaatctrtatgttgaaaacagaagatgaaagaaataaaagaagacctaaagaaatggaaaggcataccattattgaaagatgctacatggtaaagatgtgagttattcctgaagtgatccataaatataatgcaatgccaatcaaaactctagtaggacttttcaaaaattatagtcagattctaaaatttatatggaagggcagaggaatgagaatagtttaaactattttattatttatttatttagagacagagtctcactctggtgcccaggccggagtgcagtggcacaatctcagctcactgcaacctctgcctccctggttcaggtgattctcttgcctcagcctcctgagtagctgggactacaggtgtgcgccaccacccccagctaatgtttcttatttttagtagagaygaggtttcactgtgttgtccaggctggtcttgaactcctgggctcaggcaatccacctgcctcagctccccaaagtactgggattacaggcatgagccactgcacctggcctaaacaattttaaaagaataaaaagtttcaaggaatcacactagtcaatttaaaaacttactctaaaggtacagtagtcatggctactgtaccagagtggtatttgcataaagatagatatgtagataaatagaattaaatagagagttcagaaatagactcccacatatatggccatttgatctttgacaaagatacaaaagcaattcagtggagaaaggatagtcttttcagcaaaaattgtgttgaaacaattggtcatctttctctctccctgtcttttctcctagacccccaccacacacacaaacacaccccagaaattgtgacctaagcctcacacattatacaaagataatttataatggatcgtagttctaaatgtaaaacaaaactatgaaacttttagaagaaaaacttggtgacctgggttgggggaagacttcttacaattatactgaaatcatcatacatgaaatttaaaaattgataaactggacttcatcaaaattaaaaatttagctctgcagatatactgccaagaagatgaggagacaagcgacatacaggaagaaaatacttgcaaattcacatgtccaacaaaggagttatatctagaatatataagaaactctcagaatttaacaatgtgagccaaagacttgaacagacacttcagcagaggataaagggatggcaaatgagggtgtgaaaagacatccagcatcattaggcattggagaatcacaaattaaaacaatgatgaaatgccaccacatatctgttaaagtggttaaaataatacggacagtaccaagtattactgtaataagatgcagagcaactggaacttttagacagtgatggtgggaacgcaaaatggacaaccactttgaaaatgttttggcagtttcttataaagttaaacgtatacttaccatatgctccaacgatcgcactcgtatttactccagagaaatgaaaatttatgtccatgcagaatcctgtactcacatgtgtatagcaacttttttattcgtgacagtcaaatgctggaaacaacccagaggtcctacagtggatgaatgcatgaactgtgtggtacatccatacaatcagcagtaaaaaggagtaaactattgatacatgcaactacttggattagtctcratgacatgctcagaaagagaaggcagtttaaagaagtcccatactgtattattccatttctatgacctccttagtagtggcagaaaacagatcagtggttgtcaagggttatgggtgggaggaggggtgcctacaaagacatagcatgagagagtttttgggggtgatggaactattctgtatcttgattgtggtaatatttacacaaatctatatgcattaaagttcatagagctgcataccaaaaaagttaattttactgtataatctgaaaaattaaaatattttacaatgaaatgagctgctttacaaggttgtatgcaccatattactgaaaatgtttaagtattctgtcaaaaactgtttaaggctatatgtgggagactgaactagggtaattccaaggtctgttacaattctcagcagtgatagtgctgattccagggagatgccaagcaccagtgacatcaaaaatcattcgagtttattcaggtggtttaccactgaagaaatgcctttccgtgtactcagcggacggttaactggcatggatgggagctgaacaggagaaggaggctgagcagtcacttaaaacatcttaaatcagatatgtttttctagattttatttggtttattttggtttggttttgagacaaggtcttgctctgtcgcccaggctagagtgcagtggtgtgatctcagctcactgcagccttgacctcccgggctcaagcaattctcccacctcagcctcctgaatagctgggactacaggcatgtacaccatgcctggctaattttgtttatttttttgtagagaccaggtgtccctatgttgctcaggctggtcttgaactctcggactcaagcgattctcctgccttggcctcccaaagtgctgagattacaggcatgagccaccatgctcagtgtatttttctagattttaaatacaatataatgtttatgatgtaatatattttaatatggttctacaatacattttattatagtttgaccataattttatctacttttactctactacatttttatagtgctctatcagcatattttattaatacctttgtttccttttgaagtcttcaaaataatattgatattgatacatacttagaaatataaggtttattctgttatttacgttatatctgcattataatgaatgtgatccattgaaattgtattgttgatagaatttgaactaacttagaattatttggttttatttgacttgtgagagaagaactaattttaattgtttggtagaaccacagttcttttctgttaggctttaagtagaacctgtattaaccactaaataagataatgtgtcttgaaaagtaatttcgttcatttcaatattttttagcaaaatatgcaaagcaatttaagaagttcaaagaactttcataataggaaaggaaaacttaataaaaagtttctttatgagaccaatgagtcttcgcatggatttttttgcagctgtagtctataaaagaaatgcacttttaaggaacctcttggttttarataatttatttagcttattacatagttcagctttccccgtgagtcagttttaaaagtttctttttttaacttgtattttgcaggatggaggtttgcttctgaataacccttcggcattagctatgcatgagtgtaaatgtctttggccagatgtgccgttagagtgcatagtatccctgggcactggacgttatgagagtgatgtgagaaacacrgtaacatacacaagcttgaaaactaaactttctaatgttatcaacagtgctacagatacagaaggttagtcttgtttgctgctttaaaatacttcaacttctagcattctagcagttttttggtggcatttgttggtcctaactgcaaaggcatatgatatgtctgtattgtggatttaggaagtacatgggaggaaacattttgttgttttcctttctcacttgtttcttgttaggtgactctagaacagagactgttttccatttgagagmtagtgctacctttgcccacttactgttggagaagtacctaaagctggatagcacaacattttgttggagactctgaagccagttaagaaagggaaaagcaacaaaaggagtcagatttgttcaaacatatacatgatagcaaagatttagagtaaaggacattcaattatttaatactgtcaaggcaaactggaatgagaatgtgttcttgcttttactcttgctgcccctatagtttaatcttcatacagagaccaaagtcatccttttaaaatgcaaattaggttgggcacgatggctcataccagtaatcccagcactttgggaggccgaggcggttggatcacttgaggtcaggagtttgagaccagcctgatcagtgtggtaaaacaccatctctactgaaaatacaaaaaattagccaggcatggtagtgtgcacctgtaattccagctccttggaaggctgaggcaggagaatcacttgagccttgggggcagaggttgcagtgagccaagattgtgccactatactctagcctgggctacagagcaagactccatctcaaaaaaaaaccaaaaacaaattaaataatgtctgtctgcttctcaaaaccctctttcaagtgtgtaccttctctacagtgtgtccaaccaccggataattcttggtggtcaccaaacttgctaagaactctcctgcctcagggcctctgcagttgctgtactctctctctataaggctatttccccagataggcacttgacccttatttcattcaggtctctgttgaaatgtcagagggacctcagagaaacctttcctgactgcttttccattttccttatcatctcactcttaatttctcagcctgcttctttttctctttttctcttacagcatttatctcattgtaattatatattacatatttgattgtttacttattatccttctgtccaacaagaatgcaaggcaagaatttatccagtttactttgacttacccagtttgctgttgactccagtgcctggcatatagtaggcattcagtgagtgtatgttgaatttcaggttttggccttgaggtgtttgtgtgtgtgtgtgtttcttagaaacaggatctcactttgttgcccaggctggaacgcagtgacaatgatagctcactgcagcctcaaactcctgggctcaaccagtcctcccaccttagtctcctgagtagctgggactacaggtgcataccattgcacccagctaatttttcagacctttttttgtagagatggggtctccctgtgttgcccaggctggtcttgaactactgactttaagtgatcctcctgccttggcctcctgaagtgctaggattactagcatgggccactgggccttgccttgaggtttagatttcctcattttactattttgtttttaattattgggtgaaacgttttactaaattaaaaaaaattattaccacttaacagctgcttgtatttgaatctcattcttttcatatcagcatattattggccaagtcattaacataagtgagaatcttaaactccccactgaggacttttattcattgaatgaaaaccaaaaaaaagctcatrtgctagatttttcactatctgaaattttgttgccagatcagtaaaatactctttttctcccagctttattgaggtcagactgacataaaaattgtatatatttaagttgtacaacatgttgttttattgtaagtataccttgtgtaatgattcccacaatccagctaataagcatatctgtcacctgacgtagttactattttgtgtgtgcctggtaagaacacttaagatttactcccgtagcaaatttaaagtaaacaaaacttaatacattgttattaactatagttaccatgctgtacrtcagatctctagtaggtagtcataactgaaaatttgtaccctttgaccaacatctctccatttcccctactccccagtgtctggcaaccaccattctcctctgttttttttagttcaactattttagattccacatgtaaatgttactgtgcactactcattttcctgtgtctggcttagttcccttagcagaatatcttccaagttcatccacgttgtcgcaagtggcaggatttccttcttttttaaggcagaataggattcttgtgtgtgtgtatatactgtaattcctttatccattcattcatccatggacacaggttgttttcatatcttggctattgtgaataatgctgcagtgaacatgggtgagcagcaatcccttcaaaataacaatttcatttccttcggacatatacccggagtgggattgctggatcatatggtagttctctttttaattttttgaggaacctccatactgttttctgtactagctgtaccaatttacattcctataaacagtttacaagggttccttttccccagttccttgccaacacctattatctcttgtcttttttataacagccatcctaacaggtgtaaggtgggatctcattgtggttttgattcacatttccgtgatggctcaataaaatatccttaccataagccatttgctgagacaagtggctttagtcgggcagtcgcataagagttaagtctgtactttgtgcaaaccatgtaatgggcttatttggaattttcaagaaacatgaaatgttgcctcagtgtacctgcactccagttaataagacaaatgagtaaaaatttaataaacttagttaactttgaaaaagatataacaagaattgctgttataagatataacaacaacattgctgttggcccacaaaaacaacaattttatagggtttaatctgtggtgaattgctaaataaatggtaaatgattgtaagtgattaagactatgaattaagaaaaggaatgagaaaacttgattggtgtagacagcttataagacataaagtagacttgatatgggtcttaaaggatgtayaggatttggacattttaaaagagagttaagacttcctcttctggacatcataaactattagggaccagatatttcctcttaccttaaacaactagaaaagtagacaaaacaatgattttcagacatgagaaaacaggtaacataggacagcgatctctgaaaggagaatgaatgaggtcatcactattattgtccagcttgctgcctgaaaagagtttctacactatagcatagtttctattctatagcaccagaaaagtggggtagtctcagtgggagttgtggaaacaaaatttgcagttcaaggaggccaaggaaactaaaatttgtgggctacatgcaagatctgaacagtgaaaactataaaacattactgagagaaattaaagacctaaataaatcaatacatgtactgtgttcatgaattggaaatctcaatattgttaaggtatcacatcacaaattgatatgtagattcaatacaattcctgtcaaaatccaagcaggcttttgagggatagagattaacaagctgactgtaaaatgtatatggatatgcaaaggacccagaatagtggtctccaacctctttggtcccaaggactggtttcgtggaagatagtttttccgcacatgggggcggggaggggagggatggttttgggataattcaagcacattacatttattgtgtactttatttctagtattattacattgtaatatataataagtatacagctcaccataatgtagaattgggagccctgagcttgttttcctccaactagatggtcttatctagggatgatgggagacagtgacagatcatcaggcattagattcacctaaggagcacgcaacctagatcccttgcatgctcagttcacaatagggtttgcagtcttatgagaatctcatgccaccactgatctgacaggaggtggagctgaggcagtaatgcaagcgatggagagtggctgtatatacagatgaagctttgcttactggccctgccactcaccccctgctgtgcagcccatgggttggggacccctgacctagaatatctgacacaattttgaaaaagaaaaaaaagttggaggacttacatctgctgatttaaagactataaaactacattaagcaaggaactgtggtgtttgaataaagatagacatataaatcaatggtatgtaatagagagtccagaaattgatttatacatgtaaactcaaaagactttttacaaagatgctaaggtaactcagtgggaaaggacagtcttttcaacaaatggtccgggactattagatacctgtatccacagcgttgaccttgaccctttgcaccatacacaaaagtaacttggaatgcatcacagtcgttcrtggctaatatgcagaaatacaactgatttttcttattgaccttatataacttcaaacttgctaaactcacttattctagtagctttctatagctttctcaaaattgtcaacataggcaaccaggttgtctatagagttttacttcctttttaatctacatgcccttcatttccttttaatgctttacggcactgaaaaggaccctccagtacaatgcttactggaaggtgtgagactagacatcttaccctgttcctgatcttagatggaaacctgaatctaagagctgaaactataaaacatatagaagaatatgctggagaaaatcttaatgaccttgggtaaagatttttttagataggacatagaaaatatgaatcagaaaggaaagaaagagataaattagacttcaaattacaaattctgctctttaaaaggtactttttataaaatgaaaaggcaagtcatacactaaaatattgataaaacatgcatctgacccatcatgaggtataatatataatcaagttcaaaatatatagagaattctcatataacatatgtatgtatatatatataaaataataggctgggtatggtggttcacacctgtaatcccagcactttgggtggatcggttgagcccagaagtttgagaccagcctggtcaatatagtgagatcccatctctacagaaaaataaaaaactatctgggcatggtggcacacacctgtagtcccagctacttgggaggctgaggcaggaggatcacttgagcccaggagttcgaggttgcggtgagccatgattgcaccactgtcatatatataggacacagcaattcagtgaaaaaactgggcaaaagatttaaacagacacttcattaaagaagatatacaaatgactaataagtacatgaaaaccttctcaacataattagtcattagggaaataaaaattaaaccacaagataccactacctctataatgcaaaacttaagacttgacatactaactttgggcaaagatgtagagcagtgagaactctaatatattagtggttggaatacaaaaatggaagacagtgtggcaggttttttttaaaataagcataccctttaccatatgaaccagcaattttattcctaggtttttgcccaagggaaatgcaatcatatgcacatgaagacttatgtgtaaatgtttataatcgggttatttctagtagctaaaaactgaagagagccagaccagaactgcagagaacaaattgtgttgtatctatacaatggaacaccatttagcaatgaaaagaaaggaactattgatatatgctacaacatggatgaatctcaaaagtattttgtccataaaagaaggtagatacttttgattctgtttgtatgaaattctaggaaagggaaagtgggcaccaactataaagaggcttaaaggaactttttacagtgatggaaatggctatgtcatgattattgttgtgcttacacaagtgtatacatttgtcaaaacttgtcaaactatacagttaaaattggtgagttgcactggatgtaaatgatatgtcaatgaagttgatcccaaaaaaaaggaaagttggaaagggcatttcagcagtggtgaacagtatgaccaaaagcacagagagaayagaagaagtatactaatttcacagaataatgtattttggaagatgaattttatcttatagttttacccattattatggattacttctactgtcagtttgaataatgaaattagtgaatctttgtaatgtgcctaaaaagaagttaattttaaataaagacaaattaacagttcattgctcactttatccmctcttttcttatccccttatccttttcttttttgctttaacagaagtccatataatgcttgatggcctgttacctcctgacacctattttagattcaatcctgtaatgtgtgaaaacatacctctagatgaaagtcgaaatgaaaagctggatcagctgcagttggaagggttgaaatacatagaaagaaatgaacaaaaaatgaaaaaagttgcaaaaatattaagtcaagaaaaaacaactctgcagaaaattaatgattggataaaattaaaaactgatatgtatgaaggacttccattcttttcaaaattgtgatgagtatatgcttatgttctcataaatgaaggtctgtttagaagatcaaccacattcaataaggaattgtggggttcgacatgagttaactttgaaatacgtatgaattctggagaatcctgaaaaagacggtgcttcaaccagcttgcatagcacagagaatattcttggttacagaattcatatgggaactaggcttttaagatgttaataattagctaagctttagtaacccttactgtgctagtagattttagtagatattggtgttatattgtttgatgtttgaaaatatattaatatatgtgccgaacaagaaaccgaaagctatattgtactgtgtatttttactttagtcctcataatcatgttgaatttatgtgatcattgattttatttcatatggaaaagctaatttcttcttaaatttacattacctaatattctcactagctatgttctccaatccacactgccttttattgtaatatcatctaaatagatgcagaaaaatggaattttctctattaaagtattttacatttgacataaaaaagaaccagatacagttttctattcagatatgtttattttaacattgtttggttaaaaaaggtgaagttccagtcaaccactttttacccctgaaatttcaagataatgctatattaacttttccagatctaacactagcttattcttccctgttataaaatggtttgaacttactgaggagatattcctatcattaacaaaaataaactatttaaataatctgttgttaaaaggctaatgtcattttaaaattaatttttgttcataatgtagctcccctttagcctttgaatacacctggcagcagtatgcttaaaaataagaagttagttgcctggcgcagtagctcacacctgtaatcccagcactttgggaggccgaggcaggcagatcacctgacgtcaggagtccaagaccagcctggccaacacggtgaaacctcgtctctaataaaaatacaaacattagcccggcatggtggtgcacacctatagtcccagctactcgggaggctaaggcaggagaatggcttgaacctgagagacggagrttgcagtgagccaaatagcgccagtgcactccagcctaggcgacacagcgagactccatctcaaaaaaaaaaaaaaaaaaaagaagaagttaggcttgttttaccttattaactcctttgaactgtctggatttcatggaagttggtaagatgcacttacatggaacattgttcatgccaaacaaactcatctttattgtatctatttgtcacataaatccttacatggaatgttttgatttcttaagaaaaatgaaacaaaggttagcgccccttgttttagacatacaaactaaagctagaccctgttgcccagatagtcatattgcttctttgcaatatcaattcacagaggctgtgagatgtggttcaaagagtggagtcgagagtctggatgctaatcctgcctttgctgcaagaacccttctgtttgttaccttgaggaaggcaaatgtctgtaggctttgcatatctcatttgtaaaatgaggaaaggtagctgtaaaattttctaacatccgaattatataaactttagacatagtataaaataggaaactaccaatgatttctaaagataatatagttctttcagaccacaaataatacataataacatgcaactaagaacaacttgtaaatgcaagaaaaaaacaaataattggaaatcagaatatttctgggaattcttcgtaataaagcaaatttcaagcacaataaagtaatatttatgcatatttacatatttgcacctcatcataaggtcactctagtcctaaactgatgtagttcatctgttttacagctgaagttaagtatgtcccttatttgtgcttggcttatttctttcttaaataatacattacacaagtgaactctggccatggcttctttctttctttttttttttttttttttttttgaagtttcccatatatacaactcagttctttttttactgacacctaatataaaccacgtagcatggcacctaccatccctatttctttagctcttttcactctcaaacaaaaggcaaacccagttgtgtggtgcaccagttttcagccattcttgtcctcatttgtacttgaaactggttatctgaagaactgtaattcacctgagataaccctcattttataacaaggccagtgcttgctttatccaaaggaacccaaaaagtaaattctgcaaataatacaagacggcaatagaaacagatgtgaaaatgaattttcagtcttatacaggtaaaatatttgcccttttcaaaaaggcaaagaggaggaatggtctattttataaatgtaataaattcctcaactcttattttttaaatgtagaataaaaattgttttaatgctcaggttttcctgagtgtctcagaagtcttatttcaatagtaaatggtgtactggtaatatttcagttccattcttgttgcagatactattctttattaaaatagtacttcatggccagggacagtggctcacacctgtaatcccagcacttttggaggcccaggcaggtggatcacttgaggtcaggagttcaagaccagcctgaccaacatggtgaaacctcatctctactaaaaatacaaaaattaggccgggcacggtggctcacgcctgtaatcccagcatcttgggagaccgaggcgggtggatcacctgagatcaggagtttgagaccagcctgaccaacatggtgaaactccatctctactaaaaatacaaaaaaaattagctaggtgtggtggtgggtgcctataatcccagctactcaggatgctgatgcaggagaatcgcttggaacctgggaggcagagactgcagtgagctgagatcatgctattgcactgcagcctgggcaaaaagagcaaaactccgtctcaaaaaaaaaaaaaaaaaaaattagttgggcacgctcctgtaatcccagctactcgggaagctgaggcaggagaattgcttgaaccggagaggcggaggttgcagtgatccaaaatagcaccacgcaccactgcactccagcctgggcgacagagtgggacatagtctcaaaaaaaaaaaaaaaaaaaaaagtacttcagatagagttgtccctagaggcatttgagctagatgggatttcccctagagggtagagagagcccagcctgggttataactacactgtgcactacttcttcctaaaccacatttttttttttcttgagaaggagttttgctcttctcgcccaggctggagtgcaatggcacgatctcggctcactgaaacctccacctcccgaattcaagcgatactcctgcctcagccttccaagtagctaggattccgagtactttgcaccactatgcccggctaatttttttgtatttttaatagaaacggggtttctccatgttggtcaggctggtctcgaactcccgacctcaggtgatccgcctgcctcagcctcccaaagtgctgggattacaggcgtgagccactgcgcccggcctgaaaggaatcttttgaggggaaagggagtcacaaaagtatgcagtctgagggcataaaggggaatctcacaactttgttttggtggtaggagggaggggctccctctgagctttttccccccagcaactagtaacagctgagctgctgattagtggggtagctaggacctctgaagtttgaagctcagaattgtacctaacccgctatgccctagaaatggtcctagtcacacttttgaatatttcacaagtgtctgtgccagtattgtgactagaacatagctaacacttgagtgcttgctgagtaccaggaactgagctcagcaggttacgttaaattgtcacaataagcctacaaggtgaatagcagtattatccctttgttagaaaaagttgcccaagataattacagctagagagcgatagagctaggaccagtccattgtcttagccacaactcttcctatctctctttcccagaatgtctttcctggaatgttgtgaagtgacttcaaatctagtttactaaactgaatctgtgaaatctggggtttaatcagtggagaaatgtacttgtctcagtaaatgtcctctcagtcttcataacttcagagggttttttttttttttttggaaaaacaattattacaacatcaaattatgtgaatacttctctttatctcttcatttattaacacagtggtcttggaaggtttgcaaatctgggagtggggagaagcgagattgtctgggggaatcgccagcattaagtactccaggagacagataataaatgttacgggatgcaatgggcattggacagcccctcatgaataattcttccacccaaaataccaacatttctcccttttagaaactctgagctactcatccacaaaatgcaagtaatgaatttcttccacaacaaattaaaggtatactttgcccagtcagggtgcataaaccatttgtaaaattccattccagttcaatcccaactggaattatttttgcattcattggtcctcctccttttttttttttttttgccaagtttaaatacaatcaaactgttcacttaatctcacttttttggagcaaatctatggcaattactcttccatgactaggaaataggaaggaggggatcacattaaaaaaacagtttgttctgttcctggcaggagctatgtaccatccaaaaaagattcatagagtacagatgtccctaggctaaaccgttggctgtgttggtccaaggtttgataaatgtctctctcagaagtcacactgattgctttgtttattgtaacctttattcagcttgatgcgagtggattgaaattcattacacttcacagatatgcattattagcttggataattaattattttgataaaaataaagtattgactgtaacgttgacttatcttcatgataaaaatctttaacattcttatagattcattccttgcccctgaacaatataaattttgagatggtattttaaggacttcagtctgattgaataggaacaggttatatggtccaaaatggttgaatgttccagtaatagctgtagctaacatttattgccatttaatcttcacaacaaccttacaaggcaggtatcatcattattcctattttatatagtaacactgagatgatagcgagaaaagtcatatttcttgactgctttctcaatatcaatgggaaattataaaccacatcattaacatgtctatatagcaatctttacaaaattatctagaattacaaacactttaatatcctttcagatattgtcatctaatctacatcacatttaaataattgatgtgtactacttaggcaattttcaaagatcaaaccaagataaatgtacccatctaatagaatataaaatagttaacaagtgctacttggtagtgctctttttttgtaacttttaggtgtgggggtacatttgaaggctttgttacatagctaactcatgtcacatggttttcttgtacagattatttcatcacccaggtattaaggccagtacccaataatttatcttttctcttcctctccctcctcccacccttccccatcaggtagactctaagtgtctgttgtttccttctttgtgttcataagttctcatcatttagctcccacttataagtgatagcatggtatttggttttctgttcctgcattagtttggtaaggataatagcctccagctccatccatgttccctcaaaagacatgatctcgttcttttttaggctgcatagtattccatagtgtatatgtaccacatttttctttatccaatctgtcattggtaggcatttaagttgattccgtgtctttgctactgtgaatagggtagcactctttcttatggcatacactaccactgactatgtttgtaaaagataaagtggttaacagcaatccaaaattctgtccaattatctgagaagaaaagaaggttatatcatcttatagtgcatagtatgcccaacataccttggtctagaaaagtatttaatgtagtattttaattaaattggctatcaaagtaattttaaaagaacgtgaatgcaattaaaaatagcccataccttggccaagcgacaaaatgctaaaaaggaaaaaaagaagccactaaacgttttgtggcaagatatgtgtcatctatatgaatacacattcacctgtagtaatcttgaaaaagcaagtgtctttcattctgttttgtacatttggaccacatttttgaaagtgtactaggagaacagtcattgtgcttttgtatttacggtaacatatgaacactctagggaattcttaatcaaaatttttcaaattgaaaaaggtaaacaaagccagtgtaatttctaccgcactctgtctttcagatttggtcttaagaacacagatttttgaaaataatgccagtagaattaagagttatttaaaactacaattttttttctattttttaatcattgaaaccacagttttataaatcacaggtgctgttattttgctagttttgaatgaacatgtttggtatcaggaggcaattaatccatacacatctaaacatgcccttatacttccatttcctgtgttgaattatgtgaaaaaaaaatgcccaa

SEQ ID NO: 93645 - DNA, 20018 bp, Homo sapiens
ttttctgtgtgtgtgtttttctgtagagacagggtcttgctatgttgcccaggctggtcctgaactcctgggctcaagcgatccttctgctttggcctcccaaagtgctgggatttcaggtgtgagccaccatgcctggtctaaatggtctgatttaagcgatgcctcctcagcttaaactgcagggactggagaggaaacggacctggaatcagcatttattcatacagatggctaattaaagttgggcttgagctacaaagtgaacgtgtgcttctacttgggtacaaatggctccccagttagatgcaatagaagtgctcagtggggcctcacccgcctcttggcggccggctgttgctcgtcttaaaaagcgtcacctcccagtgggatattgtgactgattttagttaatcttccctagcacatggcagcgtaggaagcatcaagaatccgccgggagacagagctgaagctccatttcccaggcagggagcgccaggcaggcgaagatgacgctgttcagttctgcccaagtgtctgctctgtccatggcactcggttccccaggcggaacacggggaacagggtgagaaatacatgaaacaaaaacacagggtggtgcagcgtccgtggcgtggggaggtgggagtcggaggttccggcgggcctgcttcccatcgctgctcctgtgtccccggcctcgctagtctttggggatcagggatgctgtctagaaaggtcggctcacacygtgcgcctgaagcccaaatctgcacacccccacaattcagtactccctacgtgcctgtcccctgccccacagaggagggtctgagtccagccctctggactggggttaggcgctcaggcctgccccctgcaggcaagcggggagggtgcctaaaccggctcttggcctgggagttagggcccatcttggggtcctcctgatagaataggactgggtattgcgtggataaagcaggaaccagcctccccagagaccgggctgccgacgctcctccctgcctcccsctcctgagcagcacgggcctggggttgccccaggagcaaatccattcagactcgcaggtactgaagcccagggccgtgctggtggcctgtggctgatggtacgtcatcccctgagggcgaggctgtttgctgctgggttcccggggccctgggacccctaagcaccagcctgtctggctccagtgtcccccattcctcatgcttgcagatgctccccaacgaaggatttttttctttctttctttaagacagggtctcggctgggcacggtggctcacgcctgtaatcacagcactttgggaagccgaggcgggtggatcccgtgaggtcaggtgttcaagaccagcctggccaacatggtgaaacccccgtctccaggttacacccgaggatggaagtcacaggcttccggctctgtgcctcagttccccccctcaaaccctggtctgacagcaagccaccgctgtattcagctttgagggtctggagtgatggtccctctgtttgtgtaatatttacagagggtaggaggaaagttccttcgaccgtgacaaagttcagaagaaaataaagcagggctgccgagggggcctgtgctttgcttgtcaccagcaggacgagaagcggaaatccagccacctggagttcctccatccagcctcctcagcaccgctgcctgctccactcacacccaccacttctctgcacagctggcgctcctccagccctctgtgcttctgcaaatgtctccttcctccctccttccacactctcccagccaacgtcaggccctcagagcattttcctggtgcccagttattctcccttcctttctcctggaggcccctggccacgaggtatggaccagacctccttctgcaggtctcctgaacccggcagccagatgacacgagagctccacagaggcagggactgacctgttcctcctcatgtccccaggccccacacagagcagcgctacagaaatccatgagctgatgggcagtcttagcagatcaaagacaaagggctgggcagagaacccccggggccacctttcctgtttcctgtgctgtggtcgctctgcacacactcctggcagggacacgctgtatgcccgactcacacccagtggtcctcctccccagctgcggcccccagcacagagcctgtcgcactggcacctgccacagtgactgatcgaacgtgtccgtgtggctgcggtctggggtcccaagccttggaggggaagcacacacagggctctccaaactgagggttgggacccatgtaccccgggaaatcggcttagtggattgcaattgaaaaaaaaaaaagggtcaagccagtggcccacacctgcaatctcagcactctgggaggcccgggagggaggatcgcttgagcctgggagttaatgagacaccatctctacaaagaattaaaaaacgaactgagcgtggtggcatgtgcctgtggtcccagctgttcgtgaggctgaggcaggaggatcgtttgagcccaagagtttgaggctgcagtgagccaagagtgtgccatgggtgagatcccacctctggagaaaaaaagagaaatgaatcggaaaagtagagcccccttttatgtaataagggcggctactgcaacttactttagctgtacctgcacacctgagtgtgtacactctatcagagtacaaaacgtatttcttactgcaggttgtgatgaaaaaattggaaagccactaggctgcagcgtcctggctttcctccgtgccaggaccctctttactctgtagttctcctctccaggcaagctggcctacctttctcagaacaaaaacacgaacgggggctaacgtctgtgcagcgatgtttacacagatgatctcatttaccctgtgagggttgaggggcgtctggaggactgtgtgatcttgggtaaacggctcaacctctctgggcttcagttccttcctaggtgaagctggctgtgttgaggatgcagtgaggctttgtgcacagcgagtgtgagatgaaagcgatcatcagctccactgaacagacagaggaaccaagtgactgacgagcccttcggcaacagtgagggtgctgggagggttcaattcaagctgctgcacagaggcttccagatacgccctgcagcccccagcaccaccgcaccacaacagctaacacgcactcagcacgcaccgcacaccgcrcaccgttctaagtccttcgagttcatttcctcattttatcttcacaagagtccgaagggctgcggactgttcttcattctgagatgaagacactgaggctcacgcttaaccccctgctccaggtcacttagctcttagtggtgaaaccaagggtgtggccctacagcccgaatccctgtgccctgggaaagccggttctatggccagacctgccccatccttacctcctagccccatcctcgatggtctctccttcttgcactttgcccccaaagccattccaccggccggccccgaagcctcgctttttcatgcccaggagaactcgctgaggctgcaggaccagcaccagggtatagagcctggaggcgcccatggtccctgggttctgaaaggaaggtgagagggcagagtcagccatgacgtgcgtggaggaagcacgtgccaggggccaggaggaaggggacgtgctctgggaggcagtggggggcgggggggtatgctgtaactccccagccctgccacgtgtggcttcccttgtggcaggtggaaaactgccattgaaccagtgattttctggggtagaaacagaacccagtggtcagcagggctgatcaagcagagcagaggccggcgctaccttccttctccacaagtcagtactcaggtgcagaggacaacatcacctttccagagcgtgctcttgctcctgcgtctacccccaggaaccccctgcttataggcacacagtgaggaacaacagtccccgtgcctgattggcaccaaaataaccacgcagtttatcctgtggtcctcaggtcaggcctttggattaacaggaacttctttcagtctagtgggacctggcctctctgtagcaggcttccagattcccaggaaatgtgtggctgtagacacaggtccacccagccaggcccggctagtcctccctcctgtgataggagtttataccccacccactctgctcctgctgtggctactgtgggacctggcacccaggggggccactggaagtcacaagggtccttcctgctcccataggtgtgcaggtccaggtccagaggactctgagggcgatgcctccgccaggtccctgctgaaaaaaggaccctggagaaatgctggagggccaggaccaactttcctttatttattttgagacaagatcctgctctgttgcccaggctggaggagagtggcgtgatcgcggttcactgtaacctccgcctccctggctgaagccatcctcctgcctcagcatcccacatagctgggaccacaggcatgagccgccacacccagctaatttctgtatttttagtagagatggggttttgtcacgttgcccaggctggtcacgaactcctgagctcaagcgatccacccacctcagcctcccaaagtgctgagattacaggcgtgagccactgcgcccagccaggaccaacttttctggggtccacacctggacaagacacagggttcaggaccagtgatccttcttggaagttgtggtgtctgagaaaagggaccagatgataaggaagggggcagggaagtgctgggtagaggagggcgtggtctctggccagggctccacmcccaggcctgtgcccagggacctgggtgaggacaggcatttctgtttttttgcccaaatgttgcatttcccgagcccgccacgtccccgtcctgtgcctataaaaaaaccccagtggttttttatagtgggcagagacacaagccgctggacgtcaagaggacgtggaaagcacaccaacaggcaccagcaggccatcaactgatggaaccatgagtttggcaggggcggtcagaggagagcccaggctgctcagcagcccgactccaggggaaaatcaccttcccactccaactgccttctggctcccccatctgctgagggctaattccactcataaaaccttgcactcactctccaagccgccgtgtgatctgattgctccagtacatcaaggcaagaaacctagggatacagaaagccctctgtccttgcgataaggcagggagtctaacagctgactaacacaagccacctacaaggctaaactgaaagagcaccctctaacacatgcctgctggggcttcaggagctgcaaacattcacccctagacactgccgtggggtgggagcccctcagcctgcctgtctgtatgttcccctagaggcttgagaagcggggcactgaagaagtgagccacatcctcatcgcacgcccttcgaggaggacaagggaacctttcccatttcactgagactgggtcctggtggcggaggcaggtcagacagggtaaatgggtttgtggcttagtttcacaccaggcccgtgtactttgtcccgacactgatctgtttctgccagaagccacggtttccaaagtaaatttttgtgatttactcctggtctcccccaagcctccgccccgctctccttgtctctctcccaaacccccggccccgctctcctcgtctccctcgagcccccgaccctgctcttctggtctccttcgagctcccggccccgctctcccccaagcccatggctcagctcccctagtctcctgccgcccgctggcccggctcccctccctggtcaccacgactcctggaatccccgcgcgcgcttttcgtacctgcaccgccgcttccgggggcgtggcctctgaccggaagtgaggccaggcacttccggcggcgcgctgcaggcgcggggaacaccaatggcggggtgagctgggcgctgctgctgcgcgtgcagacagcgggagtggttgggggtccgcccggtcgccttcctcggtcctggcctcggggctgggtgccgagcgctgggcaccgtccccgcactcagcgagcgcgacaggggcgaggccaggattccgggtcgcagttccccgggaggagggcgccctcaggtctccaggggcagggccggcggggccgtggggaggccggggccggcggcggagtccaggtggggggcgcagcgccggggcccagatccaaggcgccgggggcgagcccggggcgggatttcgcttctgggccgggtagctccattgcccgcgcttcctgggctgtcgagtgggccctggcccccgggaccggcttgtgccattttcccgggagaccccttaagcgaggggaagacagcgactcacggtcagcagtcagtgcctcctggcttgtcagcacgctttggtgttgcagaagctagaagctttggccttggagccatgagggtggtaacttttatttatttatttaaatcagaaagatggacatagagaccgggcttggtggcccacacctgtcatcccagcactttggaagtctgaggcaggaggatcgtttgagcctaggagttcgagaccagcctaggcaatgtagtgagatgccatctctaaaaaaggtttttaagaattaaaaaaaaaaaaaaaattagcccaggcatggtggtgcacacctgtagtcccagctactcaggaggctgaggtgggaggttcacttgagacccagaggttatggcagcaatcagctgtgattgtgccactgcaactccagcctggatgatagcaaaacaaaaatggccgggtgaggtggttcacgcctgtaatcccagcactttgggaggccaaggtgggctgatcgccagaggtcaggagttcgagaccagctcggccaacatggtgaaatcccatctctactgaaaatagaaaaattagccggaagtggtggcacacacctgtagtctcagctactcaggaggctgaggtgggaggttcacttgagccccagaggctgtggctgcagtcagctgtgatcatgccactgcactccagcctgggtaatagtaaaaccctgtctctaaaaaamcaaaaagaagaaagaaaaatgcctgggtgcagtggcttacacctgtaatcccagcactttgggaggccaaggcgggcagatcagcggaggtcaggagtttgagaccagcctggccaacatggtggaacccatctatactgaaaatacaaacattagccggacatggtagcaggtgtgcctgtaatcccagctacttgggaggctggggcaggagaattgcttgaacccgggagtcggaggctgcagtgagctgtcactgcactccagcctgggcgccagagtgagactccgtcttaaaaaaagaaaaagaggacatagaacttccttggtgaggttgttgtcagagttaaacaaggggaggtgtgtatagcttccacctgcttagctattgtgggctgtgaataaattgttacatttattgtaacaattgtctagagaatcttggaaattgtccttcaacgattgacacaggtttagttcaattttatttaagacatgtaggtgagaggattgtttgagcccaggagttcgaatctgcgttgaaccgtgacctcaccactgcactccagcctgggctatagagcgagaccctgtctcgaaaaaaagaagaaaaaaagaaatgtgacaggccagaccctctgtactagctgtcaaagccctggaactaggtcactaaggcaaggatctgtccttatgaggttttcttgcagcctgtcagagcccaatgaacatttttgccagatgagaaaataatattactttaattaattaattgatgtatttagttattgtttgagacggagtctcgctctgtcgcccaggctggagtgcagtggcgcaatctcggctcactgcaacctctgcctcctgggttcaggcgattctcctgcttcagcctcccgagtagctgggtttataggcatctgccaccacgccaggctaatttttgcattttagtagagacggggtttcatcatgttggccacggttggccaggctggtctcgaaatcctgacctcaggggatccacctgtcttggcctccaaaagtgctggaattacaggtgtctccgaatacccccatattctgaggtaccaagggttaggacatcaacacattaattttgcggggacacagtttggcctgtgatgcctgctttccatctgtgkagccttatcagttcacctcccctcctgggccttggtgccccatctctagaaatgaatgagttgatccgagggccctcccagctsatgacctgccgttctgtgtgatgccaacctgcctgctcctcttctctcccaccaggtacttgaagctggtgtgtgtttyctttcagcgtcaagggttccacactgttgggagtcgctgcaagaatcggacaggcgctgagcacctgtggctgacccgacatctcagggacccatttgtgaaggctgcgaaggtggagagttaccggtgtcgaagcgccttcaagctcctggaggtgaacgagaggcaccagattctgcggcccggccttcgggtgttagactgtggggcagctcctggggcctggagtcaggtggcggtgcagaaggtcaacgccgcaggcacaggtgggcctctgcactgctgttggcaccttctggctcccctgaggctgagtgggcatgggcaagctgcctttgccagtggatgcgggatggtggagcccttttttgaaggcgtgtgcttccgagtgggtggtttagcaatggtgatgataaaaataggatgctgccattttcaaaatgaaagacaaggtagaaaggtgcagtgaacatggaaatcacctcgcatgagaccgcccgcaggtaccagcaccagcatggtggtgtgcatccttccaggcttgtgcatgcatagatccctcacattttcaaaagcgatgttgtgccatacttttcttgctaatttgcagcctattggagctatttttgcttaatgatacatacatatatgtattatatatatatatatatatatatatatatatatatatatatatatatatataattattattgttattatttttgttcttcccccccctccagatggagtctcactcttgcccaggctgcagtgcaatggtgtgatctcggctcactgcaacctctgcctacctggttcaagcgattctcctgcctcagcctcccaagtagctgggattacaggcgcccgccaccgcacccagctaattttttctttttgtttttttaagtagagacagggtttcactatgttggctaggctgatctcgaactcttgacctcaggtgatctgcccacctcggcctcccaaagtgctgggattacagatgtgagccatggtgcccggctactcttaatgatgtattgacatctttccccaacagcacagctaaatttccaagtcgcataarccctggggctttcctggtggccccactggggctgctccgtccggaacctagaagaggcttcatggccagggctatggattctttgctctggatgaagctgagacacagttttcatctgttttgtatcttagggttttgagtaagattttctatataaaaaggttctcctgaataatgagatcagccaaccgcccatgcaactgaagacactgtcgtcattgggaaagtttcatcctattccatgtagtgcttgcaccgtaggttctttaaccagctccctcactgtggcatcaaggttgcttttggcttttggctgggatgcgtgtgctgtggtgaatatccttgccatttatgtttcctgctgtaaagccagggtagctgcatgcactggcatttgaacagggtgagacagtccacccagagctctcccaagtctctcccaaataccttagagtagggacactggtccccatttattggtgagaaaacaggctcagggtttcatgacttgttgaaagtgcagaaatggaatgctggccccctggatctgcacatctgcctcgctgctggtttgcggtaggtttgccatgaactcttggtgtctacctgcatccccttgggtggcccctgcccatacttaggcggggatatgcctcttcgggcttttcaacagcattttttttttttttttttttttttgtttatagagcctcactctgttgcccaggctggagtgcaatggcgccatctcggctcactgtaatctttgcctcctgtgtttaagtgatttccggctaatttttgtatgtttagtagagatgaggttttgccatgttggccaggctggtctcgaactccaggcctcaggtgatccgcccgcctctgcctcccagcatcctcgaggtgcttcctggtgcttccatcgtggtcagcctgaaagcctttttattgtttttcagctcaacatttattgactaaataagtgaatttgtgttggaaatgtcagttccttttctcattgctgagcttatcaccgtggagtcctcctagtaactgatttcagtggtttctgttcccctaagtgctcttgagatgaagcaggagagtggcccagcgtgccttgtaggaggaagtgacagaaggagagagcgtgagcgtgatctgcctgggcttgtcctcccggaagtcacaagcatgcagccaaagctgtttgccttcggtggaaatttccgaaggttgtaacatactggatattataggagtgaaagctcaggagcataaagtgaggcgtgaggccgggcgcagtggctcacacctgtaatcccagtactttgggaggccaaggggaggatcacctgaggtcaggagttcgagaccagcctgggcaatatggtgaaacccccgtctctacaaaaaattagccaggtgtggtggcatgttcctgtggtcctagctccttgggaagctgaggtggcaggggtcgctcgaacctggggaagtcaaggctgcagtgagctgaggccgtgcaacggagtgaggccttgtctcacacacacacacacaaagacacacaaagataacttgctgatatttgagtaacaccagtttgctaaaactaaaaagatgcctttgtgtcaccttacgtaaaacaagacttgttgcctataactgatctcagcatctgcctccccctcttctcactctgtacctacattcaaagccccctcttcacaagcccaacgcccccatctccccaacagtcccctccactgaggagggccgtagttctgttgagaaattgtcagagttgataagctaagggtacagtcacagattttcttgttcagtctgcttaacagaaaggctgttccaacggtagggggagagaaagggaccgtgtttcattcctagtgtaaacattggaagtccaggtattttgaagattacctcatttttcaaaggcgaaacccctcagtcttcaccccaggaaaatgggacgcctcacgcctcattttagctgggtctcctgagtagctgagactacagctaatttttatatttttttgtagagacaggatcttgctatgttgcccaggctggactagaactcctgggctcaagtaatcctcttgcttcagcctcccaaagtgctgggattttaggtgtaagccaccacacctagccgatatcagtttttgtacgttattttatatctgttcattttcctcatctcttgacttgtttccagtagtttctacattgaaagcaattggattaagctggagaatggatttcttgatttaatccagaggcactttatgtactagtttattattttctttttctttttctttttcttttgagatcgagtctcgctctgtcgccaaggctggagtgcagtggtgcgatcttggctcactgcaacctccgcttcccgggttcaagcgattctcctatcttagcctcccgagtagctgggattacaggcacgtgccaccacgcctgcctaatttttgtatttttagtagagatggggtttccccatgttggccaggctggtctcgaagtcctgacctcaggtgatccacccgtgtcagcctcccaaagtgctgggattataggtgtgagccactgggactggcctattttctattttagtttatcaaaaagagcactcagagataagaaccctttcacagagagtgagccttgggtagtgaaatgataccagatttggaatcagaagtcctgatgcctggcacaggtctgcccatggctgaggatgactctaggacagtcacttcctgtctgggcctcagcttctcagatgttaaggcccgccatctccaccatgtgtctttataggatgtatagatagagaaggcctgtgtttacctrtttgcacattagctctttgccttggtcttgacattttatttttatttcatcactttgttgcatgtactgtatttttgtaaaaagattcagggtgtaaataaataacacattcaccatttcttccatagatcccagctctcctgttggcttygtgcttggggtagatcttcttcacatattccccctggaaggagcaacttttctgtgccctgctgacgtgactgacccgagaacctcacagagaatcctcgaggtgcttcctggcaggagagcagatgtgattctgagcgacatggcgcccaatgccacagggttccgggacctcgatcatgacaggctcatcagcctgtgcctgacccttctcagcgtgaccccagacatcctgcaacctggggggacattcctttgtaaaacctgggctggaagtcaaagccgtcggttacagaggagactgacagaggaattccagaatgtaaggatcatcaaacctgaagccagcaggaaagagtcatcagaagtgtacttcttggccacacagtaccacggaaggaagggcactgtgaagcagtgaggatttcttgtgccattttcataatggtcattagctccttttaagctagaaacgtagcctgagctcctgaagagttcctgggagatttgagctgattttggagatggagcaggacaagtggggagtctctctctctctttctctctctctctttttaaccaaaaagagatgacaaaactaagttcaggggccatggaaaatgaaaaagtccgctatattgtgatttgggaagagaaagttatcaagagaaagaggtgaggatggaaggatggagaaaaacagactgtgggaaggatcagaaggaatccgccgaggcagggatgggtgtgcccatgtgtgccttgacgggacttcatcttatagactgttaaactgtcacacacaaacaggctttccacccctgctctgagagcaccacgcacagatttccagttcttagtgtggctgtttaaagtagaaaatctgggggctgggtgaggccactcatgcctgtaaacccagggctttagaaggctgaggctgggggattgcttgaagtcaggagttcaagaccaacctgggcaacatagcaacaccccccatgtctacaaaaatgaaaaaccaaaaagcaaaccaaaagaaaaatctgaaatttccatctggggattaacttctgtctttctggtgaacaatatagcaattcacgcattcttcaagcagcaaaagttcccggaacaattagggaagacgtatggtctgaatttatccaggcagtgggtctgctttggtttttgctggaaatttatatcagtgtctgggctcccaagaacataaatgtaattgccaaagcaagcagtgatgtggtgtgtttattttcttttactcatctaggaacttgacgcagctttatatttaataaaataatagagattgcattattttaaggtactttcatgctttgaagttttgttttttttaaactggcttcctcaaagccatttcctggaggtgtactcatccctcaagaagagtttgttgactatgattaaattccaaggaccagtgggggaagtctggaaacccaggaatctccatcaggaatctggggctctgtccagctccccgaaggaaactgcgggtcagatgttttgatttttttttttctttgagaaacagaatctcactctgtcacccaggctggagtgcagtgaagtgatcttggctcactgtaagctccacttcccgggttcacgccattcggcctcagcctcccgagtagctgggactacaggcgcccatcaccacgcccggctattttttttttttttgtattttattttcagtagagacggggtttcaccgtgttagccaggatggtctcgatctcctgacctcgtgatccgcctgcctcggcctcccaaagtgctgggattacaggcgtgagccaccgcgcccggccgccagatgttttgacttttcattttatttctggttgcagtcaggttgttaagtccagggactcttgccctactccacctcgttctcttattccatttcattcccggggcacacaacttggaagtctttctctgaaagaaggaaaattcattgcagacccttaggaacagcatcttcttagagggaagccaggggctgggcagagacgggaggaggagaggaagagaatatggaaacgagtaaggcacactcttctcaggaaggctccaatttgaaggatagacaaaggttaccataataatggtggggcctgacctcaccccattggatgctgtgccctggcttgcagagcactgggaaggtagcctagtagcataaattgcatttctagtgggcccagaaaaaagcaaaataacggattgattcaagctgatactgagtagcaaaattttgggaagagtcaacggtgcaagtttgtccgaggaggctgccgtgggcgcggctattccacacattacggcgcgaggcgaaagccttagtggaagcgcgtcctgcgcaaagccggggggcccccgactgcgccttggctcagccttcggttccgagtcctttccgtgcggagtctcccaggggtggcggctccgggtgcggacgcggagtccccaggatcagccggtgcgcagactcggttctttacggcccgattgccacgcaggtctcgcgagagcgcaggcgcaagtgtcgcgataaatgggcgccggcggagcggagggagatccgagcggcggcggcaagctggctgcgagcggctgaggtaagcggcccggctcgcgcgggcggcggggtcccggggtcccgggggtcccgggaatggcaagggaggggccgagggcccggaccgggtgtgctcgccagggtggggcacaacgacccagaccccgtgcctcaggaccccgcgcccgccccgtctcccatgggcgcgctctcctctctgtgctctcccctcctctccccactcccctgtccccactccccctttgggctgtgctggggacagcgggcccctcgcctgggtctccgcagccgtcccttgtgccagggcgggcggccgaggggcgcgtgctcgtggtcccagccccggggtcccgctgcctaccgtgtgggtccccgggctagggtgccggcgcgccgaggaaggggcctgagctggcgcctggtggagaagtcggggctgcaggggctcttggcatcctggtggctcgcgccggtccgctctcaggaagggggcgtgtgggcccggtttcccctcggggatggcaagggccaccctgatctcgtytrggcaatggaggaattgggctgtggagcctccttccaggcgggcctgcctctgcggggctggcagcctggggagctcaggcctctgcttgcaccaggccaaggttcttgttaaatggaaactcagaaactgtgcagctgcagaagttctacctttggcttttaaacgcgcttggctgttccctagttgtggctggtgggccggcctgccatgagcccatagtaagcgccggtgttgggggtgcaaagttctttactgcggtttgtcttcagccttccaaagccagacagacccaagttccaatctccgttctgtaactttttgaagcttcggtttcatcatctctagaatctgtgtaaaaagacctaattcaccaccctgttgagactgagcttacaaatatagtgctggtcaacctgcagccgtattcccatcatctagcggtggaagacttgagggatattggccccgttccccacaactttgcaagtagatttcactgtcatgagtttacagatgaggaaactgaagttcaagaagtctcggtgctcggaaatgtcagatacctttctttctgatacctagttgaaaatagtagtagtacttattaatgtcactagaaataaacaatgaaaatgagcacagctgtgatgatcatcatctttactgtcactgttgcatgcctcgtttctgattcccagaggccagattttttttttaattaattattattattttttgaaacggagtcttgctctggcacccaggctggaatgcagtggcgcgatctcagttcactgcaacctccatctcctgggttcaagaaaatctcctgtcccagcctccggagtagctgggattacaggtgcacgccaccacatctggctttagtagagatggggtttcaccatgttggccaggctggtctcgaactcctgacctgtggtgatctgcccatcttggcctcacaaagtgctgggattacaggcatgagcaacagtgcctggcttatgtttatttatttatttattcattcatttatttattttgagacactgtctcaccccgttacccaggctggagtgcagtggtgcggtctcaggtcactgcaacctctgcctcccagtttcaagcgattcttgtgccacagcctcctgagtagctgggattacaggcgcacaccaccacacccggctagtttttgtattttattagaggtggggttttgccatgttggccattctggtcttgaactccggacctgcctccgcctcccgaagtgctgggattagaggcgtgaaccaccctgcctgggcaagaggccagactttgctgtgagtgctcctggtaggtagtttcaggcatcaactgactggattcaggaattcctagaaacctgggaaagcatcatttttggttttgggtgtgcctgttgagggtgtttccagaggagatgagcttgggagtctgagtggaccaggtgctgaagatccatcctcagagtcaggggcagtatctaagagcctgggggcctggagaggacaaaaacagagaaaaggcgaatgtgtccatctgcctgcaggagctgggatacactcttcctctcctctcctcaacagcagcactccaagctcgccggcctttggtctccaggacttgtcccagcagcccctcgaactgagaattacaccatcggacccctggctctgaggccttcagacttggactgtgtcacactgccaggcttccagggctccaacttgcagacggcctgttgtgggacagtctctgtaatcgcgtgagtcagtttccccaataaagcccttctcttgtgtctgtctctgtgtcctgttggctctgtgtctctggagaaccctcttacagtgcagttgggggacgtgccacctgagtgctgagccccgcctcccgggcgccagctgtccatctgtccatgtgcaactgagactcaattggtggcttgctggtggggatttggtggcatgcttccttgcttccattttttgtctggtaaattggcagcatggctcccagttgccattgaagaatgtggttacaggcatgggtgtattatgagctccaatgtgcgttaggggagtggggctgtccagaggctctgctgactgcacggctgatggcacgtggaaaggctgcccctgaccagtcctttgtctgtccccggaaggaaagcaaccatggaagacctgggggaaaacaccatggttttatccaccctgagatctttgaacaacttcatctctcagcgtgtggagggaggctctggactggatatttctacctcggccccaggttctctgcagatgcagtaccagcagagcatgcaggtgagtggcatgtgcctgggtgggagtctgctctggggagaccctgggcccgggcaggacctcttccagtcttctgtagttgaggtgggtcggtattagcagagcctagagacagctattcgtctcccaggtctcactatgggcactcctcattttggggtcgtagctggaggctagttggggccctgagccatcctggcttaaaggcctgccttgttagcgccctgagtgggcctggcgctcagcattgcgttcacacaagtgcactcacagaccctggtgacaggatcggaaagccagttcattcatctaattgaggacagaacccaaactgcctgggggagtgagcaccaggactgtcgggaaggctgtgttggaaacacagtgctgagagtgcctgggcagcccagagacaaagccacagcagtgagcagaaggactgggtgttttgtggtctcagactgtggagggccatttacagattttggggtgatttttacagttttcttctataaaatagttgtattttgtttcattacaagttcttggggtttctcactgtagacacaactgcagaggattcaggcctcctgaaggacttcaggctccaaagagtgatgagcccagtcccagttggggctgcgataacggggcccccaagttgtagggagtggtggggagtggagtgctggctagtagtgtctccagccttgcctgggccctgtggctgcgcaggctcctctaggctcctctgcctggaccctctttcccagtccctgctgcggtccccagagccgttctgtagttctgtccgcattagaggaggctctggcttcctgcgctctcagagcccagatgaggccctgctgcatttggttaaactgtgtgtgcgtgtgcatttgttttgttgcataattgaattaatgtgtgtttattagaatgctagcttgtggccagatgtggtggctcaggcctgtaatcccagcactttgggaggctgaggtgggcggatcatgaggtcaggagatcaagatcatcctggctaacacggtgaaaccctgtctctactaaaaatacaaaaaattagctgggcgtggcacctgtagtcccagctactcgggaggctggagcaggagaatggtgtgaacccgggagtcagagcttgcagtgagctgagattgcgccaccgcactccagcctgggtgacagagtgagaccctgtctcaaaaaaaaaaaaagaatgctagttgctagcttgctcactgccctttcttgatgaggactgttttttattctgagattaggtcatatatatatatatgtgtgtgtgtatatatataatatttatgtaaatgttcttttgtgaaattatgaaggtaatagatggtagttgttttttatcactgacaaaatgagaagtggccaactctgagctggttgcagtggctcatgcctataaccccagcactttgggaggctgaggtggctggatcacttgaggtcaggaatttgagaccagcctgaccaacatggtaagacctcatctctactaaaaatacaaaaattaggcgggtgtgggcacctgtaatcccacctactcgggaggctgaggcaggagaatcgcttgaacctgggaggcggaggttgcagtgagccatcgcgccactgcactccagcccgggtgacagagttggcaactctggtctgaaatgctgtgattttagtgttgcgaatgtctgggacctcttggcctgtctgtcaaagctgtgggattctagagtctgtc

SEQ ID NO: 93646 - DNA, 164831 bp, Homo sapiens
  misc_feature (1)...(164831): n = A,T,C or G
tgaaaaggaaatcaaggtaatctctgatgagggaaaactaagagcatttgttgacagcagaccaatgcaaaagaacagctaatggaagttctcagtggaaaagaaataattttttaaaagaagaacttggagtgtcagaacaaaagaaagaacatggtaagagcaaaaatattgttaaatacaacagacttcccttctcttgagtgttctaaactatgtttgatagttgaaaaaaaaattataaaactgtccaatgtggtgttcaatatatgtaggaaaaatatttaagacaattataaatggggaaggataaaggactataaagggaggtacgggttccacacttcacttgaatttgtaaaatattgactgcagtgataaattatggggataaatcacatatacagtcatgcaccacataacaacatttcggtcaatgatggattgcatatataacagtggtcctttaaaattacaatgccatatgtttactatgccttttctgtgtttaaatatgtttagatacacaaatatttaccaatgtgttacaagtacctacagtattcaatacagtaacagcgtacaggtttgtggcttaggagcaataagctctaatagcatacagcctagatgtgtagtaggctataccatctaggtctgtgtaagtacattttagtatgttcacacaatgacaaaaccataatgtgcatccccatcattaagcaatgcatgactatatatataatgtaataccaagaacaaccactaaaacaataatacaagcaggtactctcaaaaacacacagataaatcaaaatggaattctaaaaacacaataaaatcagaatttaattgatatttatagaactgtctatacaacagcacaatatacctcctttcaagtacccagatagaacatattctgggccataaaacaaacatcaacatgtcacagggcaaaccccaaaactggagttcagcccaggaggccacgtgggtttttggctttgtgcagaaggaattcaagggtgagccgacagagtgacatgaaagcaagtttattaagaaagtaaaggaataaaagagtggctgctccatagacagagcggccctgagggctggtggttggttatttttatggttttttttttattatatgctatacaaggggtggattattcttgacttttctgggaaagggatgggggaattcccagaactgagggttcctccctgtttcagatgatataaggtaacttccagacgttgccgcggcatttataaattgtcacggtgctgatggcagtaacctttagtatgctaatgtattataattagcatataatgagcagtgaggacaaccagaggtcacttgcatgaccatcttggttttggccagcttctttactgcatcctgttttgtcagtggggatcttttaagacctgtatcttgtggaaccagatctactgacctcctgtctcaaacacacttaaaataatggaaatcatacagaatatgttcactgatcacaatggaatcaaactagaaatcaataacagaaagataaaacagggaaatctccagacagaaactaaaagcacacacttttcaaataatccaggattcaaagtagtagttacaaggaaagcaaaaaaaaaaaaaaacaaaattaactgaaagtgaaaatacatgtgaaactttgtggggcacagctaaattagtgctgaaatgggaaaatatattttattttattgttattatttttgagacaaagtctcactcagtagtccaggctggagtgcagtggcctgatctcggctcaccgcaacctccccctcccatgttcaaacaatcctgcctcagcctcccgagtaggtgggactacacgcatgcatcaccatgctgggctaatttttgtatttttagtagagacaggacttcaccatgttggccaggcagttctctaactcctggctcaagtgatccgcccgccgtggcctcccaaagtgctgggactacaggcgtgagccaccgtgcccagcctaagatacgaaaatttagagcgctaaatgcttactttgaaaaggaaaaaagtttcaactcaataatctaagcactcacctcaagaactagaagaagagcaaaataaacccaaagcaagcaaaaaaaaaggaagatactaaaaaagaagaacagaaatcaatgaaattgcaaacagaaaaactgatgaaacaaaaagctggctttttgagaagatcaataaatttaataaaactttagtgagactaacacaaaaaagagagaggatacaaatacctaataccgggaataaaataggggatagcaacatagactctgcagactcaaaaggataacgtaacaaccctacacacataaatgtgacaacccagacaaaatgaaccaaatttttgaaaagtataaacgaccataattcacccaatataatataggtccatttgaatacccctataactatgaaggaaattgaatttgtaatgtaaaaactcagaaagaaatctacaggatcaggcagtttcactgaagaatcctactaaacatttaaaaaattaacaccaatgtacacaatctcctccagaatagagacgaggaaacacttcccaactctttttatgaagccagcattatcttgataccacaaaaagacactacaaaaaagaaaattagacaaactcttctgaacaaagatgtaaaaatcttcaacaaagtattaataaattgaattcagcaatatttaaaacacaatacactgcaaccaagtggactttattctgggaatgcaaggctagttaaatactcaaaaaacaatcaatgtaatccaccatattaataaactcaaggaaaaaaacacaacatagtatcaattgatgcagaagaaatattgacaaaattcaacatttgtgagaaaactctgagcaaactagaaatagaatgggacttcttcaacctggtaaaaggcatctataggccgagcacagtggcacacatctgtaatcctagcactttgggaggccaagtcaggctgatcactgaggtcaggagttcgagaccagcctggacaacatggtgaaactgtgtctctaccaaaaatacaaaaaattaactgggtgtggggttgctcgcctgtaatcccagctactcaggagacagaggcacaagaattgcttgaacccgggaggcagaggttgcagtgagctgagatcgtgtgccactgcactccagcctgggtgacagagtgagattctgtctccaaaaaaaaaaaaaaggaaaaaaaagcatctataacataaaacaattctggaagacagactgctttcccctcacattgggaacaaggtaaggatatatattctcactactcctattcatcatacatgaagttctagtcattgtaataggaaacaaaaataaaacacagattaggaaaaaattaaaactttctctattcacaaatgacatgattatctctgtagaaaaacccatggaatccaccaaaaattcaaaaaccaaaccctgaactaatgagtttagcaaagtcagaggacatatgtacaacacacaaaattcaattgtatttctgtgtacaaacaatgtacaatttgaaaccagtattttttagaatgagatttacaatagctccaaaaacattaaatacttaggtataaatgtaacaaaacatgtacacaatctgtatgctgaaaactacaaaacactaaacaaatcaaagacctaaataaatggaaagacatatcatgttcatagattgggagactcaacaaagtaaacagcaattctccctaaattgatctacgggtgtaatacaatttcaatcaaagcaccagccaaatttttctgtatccacaagctgattctaaactttatacacaaaggtaaaagaatcagaatagctaaaacaattttgaaaaagaataaaactggaggaaattatactacctggttttaagacattataatgctaaattaacaaagtgtaatactggcaaagggaaagctaagtaaatcagtggaacaaaacaggcccaaaatagaccctcacaaataaagacaattgatttttaacaaaggtgcaaaagcaattcaatggagagaagacagtcttttcaacaaatagtgacggaacaactggacatccatatgcaaaaaagtaaaccttcacaccttatacaattaactcaaatggatcacagatctaaatggaacacttttataaaacaatttttagaaggagaaaatcttgacctgttaggcagagtttttagacatgacaccagatgacccataaaaggaaaaactgatactggacttcaccaaaattaaaaacattgctgtctgaaagacactgttagaatgaagagaaagacagactggaagaaaatacctgaaaaacacgtatctaacatataatttgtatccaaaacatataaagagccttcaaaactcaacataagaaaacagcccaatttaaaaatgggcaagagactttgccagatacctcaccaacgactccatgtggcaaatgaacacatgaaaacatgtacatctttagccattagttaaaggcacattaaaaccacaaggagataccactacacacctattagaatggctaaatttaaaaaaactgacactatcaaatgctgggagtatgtggagcaactagaactctcacatgttgcttgtgggaatgcaaaatgacacagatactccagaaaacagtttaacagttttttaaaagttaaacatacatttaccatatgaccctgcaatccactcctagcaataccctagagaaatgaaaacatgtccatgcaaaaacctgtacatggtatttatagcagattgattcataatcacagaaaactgaaaacaacctcaatgtccttccatgggcagatgttgaaacagactgtggcatatccacataataaaatagtactcagcaataaaaaaagaaattatccatacatgaaacaacttggagaaatcttaaaggcattatgctgagtgaaaaaaagctaacatcgaaagattactaactgttatgatttcatttctagaaaagattagtaattgccaggggtaaggagtatgatataatgggatcacattaggttttttttctgtggcgggggagcgatagatttgttctacatccttactgtagtggtggttacatgagtctaaaattcgcagaactgtacatcgaaaaaaaatcaattttaccatacactttttaaaataataaattaatttccttaaaataaatttaaagaaaaaagccaaattaaattttaacaggcagtcggactcttgcttttcagaaactatagacttaaagcactagatcaaaacaattacgttcctagaaataagcatacttctgagtacaattaaaaacctcgacaataatactttatataaataccctttccccaaaacttttaacattttgctaatgcggtctaataaattagagaagcaaagggtgagttaactcactaatcaaaaggttgttttctcataacagcctttatttaagtagaagtacaggttatatttgtaaaaatactgaaaaacttcttagggtcaatgaaattacctagatgttaggagatacataaaaacctagagaagttaacagcccttttcagaccctactgccacttcactagctcctgataatgaagttcttactctcacacgctctcaggttcttactcctgggaactgccgatggctcctcggatctccgagtaaagttaattctgtagcaaccagtgtcaatggaacagcacaatttggctcattcatattccagcactctatgaacaagaaactagggaagggtggggtcgcgggtaaagagtggtcgcactgcagggaggagtctaaatgccagggtggagctgaggactctcttcgccatcaaacctaacctgagcacttcacgcccttactggtgtctggcccagcccgggtcgccccttccccagtcgggacttggggcaggcaaaaagccgaacgttcggccagactggggacgcagcgccgccctcgctccacccctctttcccgcccaccaggcaattccaggtacccaccgctgggagctgggagggggcgccgggctggcgctgccgcccaccttctctagctggaacttgggatcggtgctcagggaggggagagccggcgctcggcggtccgaaccgggggatgggggagccgggccgggaggcccctgccctcgatacccctgcccactccggagagtaaggcacaacccgggaccccggggagaagctgagtcttccccagtggagccggacgaacccccagcccctggagagggcgagtgagtgcagcgccgctgcaccgcagcgcgagccgctactcaccgtcccccaccggccgcggacccgccgcccggcgccaccggctcctcctggtcgcggcgcaaccgctgccgccgctgtctcctcccgacgcgccagctctccctgcggggccgagcggctagttcgcaccctctttcgctctcttaagaatgattatgatttttaaacgaactttattagtagccagggctcagattgagtggctcagcagcagctccgccgggggtggtggggcgcgggagtctcgactcccctcatctgtggacccgccgcgctgcggagcatgcgccgtgcttcgtctgcgcatgctctgtgcggacccgcggccctgccccgcccctgttctggcgggtggctggcggcggctcagctttccaggcgcctccaagggagcccgggagggcagtggggagatcagagacgagcaggatctcctagatcgtgaactctagaaaagagaaatcggccaatgacggtccgcatgagtttcgcctacagagttatcacacttccagtgtcctcaaagggcttgccccgcttcggacacctaccttattttcttgaccagatgacatcttaagtggccaagtgagcaaaaaaatgtcgagcaaagtcgaaaacgcactcacacagcctgcaggacaaaatagaagcctgagatggttaattattcagagaagcgaaccaaaaacgaaaaggttccgcaaaagcaatctcaactttgcttcagttgtttttatatttcaaaataaaatagaatagaaaaaaaagatggaaaataccaagtgttggccaggatgtagagtaactgcattcttctactttgctgctggaatgtaaactggaacaactcctttgaaaaacagtttgggactgtctgcaaaaggtgcataccctatggccccgcagttccacgcctgcatatagagcaaagagaaacgaatacttagggtgcacggacaggcaggtatcagaatgttcgtagctgcatttattgtaataattccttaatgagaataacccaaaagaccatcaacaatagaataaattaatgaaattacacagagttcatataatgaaacactatacagcaacgcaaaaaagcatctgcaattacaggcaataacgtgaatcaactggggaaacctaatgcccagcataaaaagacaacaaaagtacacatggcataagtccatttctataaactacaaaaacagaagaactaagaggctcaaagttagcataatggttaccttggtgggcaggggatagtgactggaaggagttagcgactagaagaggggcttccagttagcaactggaagaggggcttccttctagtgaggttctctccgttgattttggcgctagttataaatgcgtgtccatttgtgaaaattcaagctgtactcttatgcacatttttctgtatgtgaattataattcacacttaataattttaaaaattagtggagattattttacctataatagcaatagtatttgtaagaaatttaatatcaagtagctaacagatttatctctaggatttggttggcagtatctcttaaacttgagtaacgtactgatgccctttctgagaaaagaaaaaaaacaattaaaaagttggcaaatgacttgaatagacatttctccaaagaaggtatacaaatggccgatgagcacatgaaaagagactcaaggtcactaatcatgagggaaatgcaactcaaaaccatgagatacaacttcacamtcattaaaatgatgattataaacaaagcagaacagaaaataaatatgagtgttggcaaggatgtggaaaaattataacctttgtgtgctgctggtgggaatgtaaaatggtacggccactatggaaaattgtatggttcatcagaacattaaaaatagaattatcgtatgattaaataattccacttctgagtatatattcaaaagaattgaaaacagggactcaaaaaaaaatttgtacaaccatgtttatagcagcattattcacaatagccaaagggtggaagcaacccaaatgtccatcaatggatgaatggatgaacaaaatgtagtatatacatgcaataaaatattattcagccttaaaaaaggagggacccaggtgtggcgaggtatccctgtaatcccagctacttaggaggctgagatgggaggatcacttgaatccaggagttcaagaccagcctgggcaaatcctgtctcaaaaataaaagagagagagggaaattctgacacatgttatagcatggatgaagcttgaagacattatgcctagtcgcaaaaggacaaatgctgtatgattcaacttatataaggtacatagagtagtcaaattcatagagacagttggggggtgggaagtggttgtgggaaaggaagggcaggtgggaatggggagttactgttttatgtctacagttctagctttgcaagatgaagaaagtctggagatagatggtggtgatggttgcacaacgatgtgaataaacttgatgctcttgaactttatacttaaaaatggctaaaaatggtaaattttatgttttatgtatatcttgccaaatttctttttaatgggaaaaaaaaaaaagaaaatcttagagggtctcagggagtacttctgggatccaaatttgagaaaaacttcctgaaagggggttcccccaaaatcatttctttcctccccacttttccatttccttgggattgttggacattgaaggagatccagaatatgccaccccaaaacatgccactttgacacaagcattatttggagttgaaggcaattaagaaacagcagaacagaagaaacactctgcttttcctatttctgcctaaaagcaggacataaatttccctttgtgaagttgttcctcctccccatcccacactaggaggaggagattcctatcaccagagcaccaacttgagtcatatggcaaaccttgcaaaataacccttgtcttccaatagtttccctcatatagtttactcggccacaatttaccaccttcacaagtcccacccctttttcctttgtcttatcacttctccacaatttatcaccttttaaaaaaatggtatataagctcttaggcctaactgctttttggggttttcacttcctttctgtgaggccccccatgtgcatatgaaataaaccttttctcctgtttatctgtcatttgtcaatttaatttgcaggcttctgctactgaacttacaagagtagagaaaaagtgtttatcctccctgcagacatgctcagtgcaattaaagtctactttttatttgacttgaggctgctctcaaggacacagcagagattctcatgctctcactgaaggcagtgaaataatgaaagcctgcatggaaacctggccttttaaatcatgtagttgtgctatagtagaaatagcaacagaattaacctaaaaggttttgaaagaaattttacctgcagtgactagaaatgagtttcacaaaattattttaaggaaaacattctgaaaagttagttattaagtcattaaatgattgtttgaatctagtacctccactgatccagcaaaaaatgtccatttgttcccttgctcgttctttcattgtgtctgactctaatgaactgaacagtgtccaaggatcatgaattgtagctgagtagaaagaaaaacagaaaaatcagaaaatattttcttccaagaaagaaagctttgaaaattttaccacttagaatataagtctgcatatacatatgaatgcatatgtggccatctggaaaaaactagtagaaatcacagtatttggctagacaataataatctactgttcttcagattcaaacagatcatgctggaaaaaaaattttttctagtactttctaggcagacattagagtactgattcagtttttctgttgcttaataaccttggatcttagtatcctcatctatagtaaggagttacccaccttacaaggtcatttatccattaaaaaaaatacatattgtgccaaggactgtgctgaacattgggtattcagtaatagacaaaaggcagatggtttgtgtcctctgggagcttataatgtgttaagggagaccaaaaaagaaagtatacaaatacacacatatgcacacatatacacaaataagtgattacatacccttagacattatgtgaaagtaaataactggtatgatggaagcatgtaagagggagccctaatttatgttggagaaccaagggaaggcctttctgatacagtgatttttaagctgttatctgaaagataaatgagtttggtraagaatagacagaaaaagcctttaagcagagacagcaggaagtacgatggcctgaggcagcaaacaattcactgggtttgaataattgaaagggagccagtgtgcaggagtgaggtggaaagcggtatgtaaaaaataaagaacagtggtgagggaagcaggggccagatcatgaagaccttgcaggtcatattaggtaatttggattatatctcaagtatattgggaagccattggaggattttttagtgcacagactaggagatccactggacagttttaaaaaattcctctgactgctatctagggaaaacatagagtagtggaaaatgggagagcaatggaaggccggttcaggcaaragatgatggagggttagactgagatggttacaggggtgatacagaaaagtgcatttgtttttaatcttggaagtagaacctataggatttggctatggtgtaggaaaaagacggaatgtaaagagtgacttgcaggtttcttgaatgactgccttgctgagattggtcactaagggactagttataacccctcacagtgtgagtcggggaataatctgttcattctaaattcctttttgttttgtccttgattgttcttgtattatggtctagtgtgttccagcatatacacttctagatttagggcccttactaacaaagaataattagaaaataaaaatcttttttttttctttactgcccaagtctttctcatatatatatttacttttgttgaaatactcttagtatactgagagacctcctctctaatggaaagggctggactagacaactctctgacttttgagaacttcgctcatggtaaataaggaaacgtctgtgtgatattcttcctcacacttctgttggaacatttgttcacctcgcttcagtgatctgatgcattttcaagagcttattcacaatcaagtttttgtcatccattccataatttaaattcttctcagtaggctgggcacagtggctcacgcctgtaatcccagcactttgggaggccaaggcaggaggatcacctgaggtcaggagttcaagaccagcctggccaacatggtgaaaccccatctctactaaaaatacaaaaattagctgggcgttgtggcgcacgcctgtaatctcagctactcaggaggctgagacatgagaattgcttgaacccgggagatggaggttgcagtgagccaagatcatgccactgaactccagcctcagccacagggtgagaccatctcaaaaaaaaaaaaaaaaaaaaagaataaataaattcttttctcagtgctctcataaaataagtagaaggactatttgattaaccttatttgtacatataaataaagtaggtaaaggtcacataccctacaggtagttttgatacaagaatccaattctcttaatgggcagttatgaattcaaactcatccacttgcccattccctggatttacaattattaagtcacaaaaaagtggtgaggaaatgttctacttgtgctaatacttgtgcatcaaatacttgatgctcatgacagaatatttttacctcttaaatataatcttttcaacattaatcagtaattgaggttttgtgcttaaagttattttgcaaccaggactaattcttaattttttaaccacttctactcaacaaatatataaaacactttaaatattgatgcatctcctggtttttggtttttatttcttgatatcttatagaagatctacaaaactagagttagaagccagaaagaagcctcagatggtgataaataaaaatgttctgtcttaatgctgattttttcagtaatgaagtggtataaactcattactttcatgaagcttcctaggtcatgaaaataacattgttgtagagcttccatgtgcatcaggtatgactgaatagtttgatgcacttgcaaatcacaaagtgccttcctttgaaatgtgtaaggcaggttgagatgcagcttctcagatggatttagtccctcctaggactagatgtctccttgttgcagctgaattctcatttcatttacccataactagaaacacctcatgaacacctattttaaacattgagttgccatcaacctgagggaccaaagaaatggattgagggcagggagtagttggaaagagcagggaattgatttaaagatgagacatgtgcgataatgaggtacaggcactttgtggggtatgggagggccccaggtagacaggagctggcatatggcttacagtcatccagccaacgttattgggctcttacaactcaggcttcggagccagaatccctatatttgaattccagctgtaccacttactagccgtgttaccttggacaagttacttaaatctctcagcgcctcagtttcctcacttgtaaaatggagataatagtagtacttcctggagttattagaggaatttaatgagttaccataygtaaaagcacttagaagagtgtaagccctcaaaagagttagtagaagtactagtagtatttgaaagttactagttatatgggaatggaagggacagaaatgtctccaaacggactcatctctaagtggtgaaatgccaatggcattgccaatgatatatctttttctcctccttgctagagtttttcttcagctttactgctctgcagtgtccaagtatggattgtttttattatatctacagtatttagtgtgctacttcaataatgtctttcttcagttctgsaaaattctcagccttatatcttcaaatattgcctctaacccattctattttctttttctggaactcctattaagagaggctgatcctaaacccctcttataattttcatatsattatctttctggctttattatgtgaaatggccgatcttccagtttaccaatttcttctccatctatttctattctacagtttaaatttacctgagtttataatctcaatgaactacatttaaaattttccacatgttctctgttttgttaaaatttcttttctcctgtagtcaaattattgtattcattaggctttttaatctttttttgcattactttaattctttttttatttatttattttttttttgagactgaatctcgctctgttgcccaggctggagtgcagtggtgcgatcttggctcactacagcctctgcctcccaggttcaagcaattctcttgccttagcctcccgrgtagctgggattacaggcacatgccaccacccatgcccagctaatttttgtatttttagtagagacagggtttcaccatgttggccaggctgatctcgaatacctgacctcgtgatccgtgcaccttggcctcccaaagtgctgggattacaggtgtgagccactgtgcctggcctgcattgctttaattcttttgaacataattattttagtccctttgctattgttccattatttccaattcttttttgttgcactcgatgactctccctcatcatgcctcctttggtggtttttaatttaggaatgtgaagtcatcttcatgagggctgccttttctatgggacttctatatgcttagcccctgtacaatggcttgatatctgcttttgatatttgcttttgtcaaagccagggcttcagaatgttcaaagatgtgggaacagcatttaaattctcagcttggaatgcccacatcacataggtagcataaattcagaaaacatgtccatccatggtgtaggttttgggccttgattcctcccagaaacatttccccattcaggatcctgggggatggtaatcttccttgtcgcttccctgttctccttgacaaaatttttctagctcccttttcactgaattggtgcgtattctagtgccttgtttttatgtctgtgtctcacttccagccttctctttcatctagaccaggacatctcttcaatcacttgggagcattcaaccttctgttttggtcctcaggtggggcactttcttggcctgtcaggaccaytggggattcccctttctttgttttgacataggctattgtattttttgttgttgttacagtttatcttagtgtatatgtttatctacgcttatcaaggctgtgcatatctagtgggagggttgatatcagttcagttagcatcgttacaggaacagggagtcttgctttattttttattgcaaattaattctgatctgagacatcacttgccaggggtcgtaagatacccaatgtcagtctttaaattaaagatttccttctcttttccatagttgcacaagacttgtcagaggcttgcacagtttggaaaacttaggcaaagaccctggtactcaattgtgatcatcactgtgatgtgaattgcccatgtacattgagtctatttgaataaatctacatcctttgtgcccagtttggttataagtatcttttacctcaactcccagggttatggaggttggtgttcatgtctccaccactgagaagctgaagcaccttcagaggctgtactgtatctcctggtaaagccaggcacagatacctgtagtttttggaacctgctacctccatcagtctctaggaaactaattacattttttcaatcctaaggatccacctcttgagcagaatggtgaggacatttgaaatgtgtaggtacattttttggttatcttaatgactagggtatactattgttatttagtgcctagaaaccagggatatccagtgaagctttccagaaagtccactggagacttttctttgagaaacattgtcttttccatccatatgtgagatggtccaacttaatcctcttggaaagaccatacttaaaaaagtttttacttttcccctagggaaggtgtaatgagctcagacctttttaaaaatacaatgttaggtttctcttcctgtggtagggaggggaaagggattactttattctacttggtaaatacttatctcaaaaactcaccttgaattacaaataatgatgcaaaaacaaattacaaactgagaaaaaaatactctcaatatatgacagataaagggctaaatttctttaatatacaaagatctcttacaagtcaataagcaacaaataggcaaaaaccactcacatccagatactgaaatgaaagataatagcctattgacatgagtatatttaatatcttcacaattcagaaaatgcaaattaaacaataaggatataattttccttgtgtctgattgacaaattgaacaggttaacatttaatatggggaaggatgtgggaaaacaaatattttgttggaacgtaaatggaattaacccttttagagagcaatttggcaaaatatatcaaaattataaatgtgtatttccatgtgtaacaattttatttacaccattttctatgagtgcttgaaaatattagtatattccaggtagaatccctaagggaaaaaaaaaacaaaccactagtacaatgaacttaattatcccaaacgctagggaaaatggatatggaatttatggtctgagcaaagcattcaatgcttttcttcttttcatcctaagttatagttggttacttccaaatataaaggctaaagctttggcattaccatgttttcagagattcagaaattcttctattaaagaagataatctgtcttgaatttcttccaaagatttctttttttcaagagacattatttaaggaagatagaatgaatgcaagacaaaacaagttccgcaaaacaaaacaagcgttccgttgttgtattaatgatggttatagacatcgagtttcagagccacgttgatgagtccagattctggtcctcaaatttgtaagtttaaaaattaaaattttagggactgggcgtggyggctcacgcctgtaatcccagcactttgggaggccgaagcaggcggatcatgaggtcaggagttcgagaccagcctgaccaatgtggtgaaaccccatctctactacaaatacaaaaaattagccaggtgtggtggcgcgtgcctgtaatcccagctgctcaggaggctgaggcaggagaatcacttgaactgaggcggaggttgcagtgagctgagatcgcgccactgcactccagcctgggtgacagagtaagactcygtcaaaaaaaataaaaataaaattaaaattttaccaagggatggttaggtaccaggaaaccaaccatctttcaagagccttatatacataaatcagaatgctaatttattaacctgtaataggatatatagcaagcatgataaccagatttaaacttgtcacaaaacaccttcyctttcttacaaatagcagactcctccttcttgcyctctccctgttcttcttccctgaatgttttctttttgttgtgcacatacagttaggacaccaaattgtaagtcagaaagttgttgggtgagcacacagttaaaacaaatggaattggatgcttttgggatggatttccagcaaactgagaagtactaaggaattgtccttccacatattagaggtatttcttcctaaaaagctggccacagatcaagaatcagaatactctttctctggctagtacaggagaaatactagcaaagatatattttctaattcttctttctctagtttccatgcaaaccatcatattcctctgtatgaaatcatgtacccacagacatgttggagtttggtcatagcctagtttgcatttatgttttaaattgatatctccagcaagaatttcagatatattcttgccttactgaacttttgtctcagggaagttttctgggatgagtttccataaatggggtaatgtcaagtattttatgttgcttctttcccattcctgaaagtaagaattatattttcatttattcatccatcatacattgagtgctgtaatttgtcaagcattatgagtgatacaaagatacataaaacattgttcctgaatatatttaatctttgggttttatctagactatgtactattttaaaaattaaactagcttttataattctaaaagttacaacttgcactggtaaaacttcaacctctacacaaaatgygtaaaatgatcactaaatgtctaccctctccgtatgcacttacctgatgcctgttccactcctaggggtaacatcttgttaacaatgtctttcctccttccctcctccccctccctccctccctccctccttccctttcctccctccctcccttccttcctccctccctccctcccttgacaggggctcactcctttgcccaagctagagtgcagttgtgccatcatagctcactgtaaccttaaacacatgggctcaagtgattcgatccttctgcttcagcctccctagtagctaggaccacaggtgcacagtactacagcacaactaatttttaaaattattattttttatacagacaggatctcacaatgttgcccaggctggactcaatctcctgggctcaagtgatcctcccgccttggcctcccaaagtattggaattacacatgtaagccgccatctctggccctctgttaacaatttcttatttattcttccagaattttagtgtgtacgaataaatagatrtatgattttctgccaaatgctacatacatctatatgtgataagtaattctcaatttgaaggatagactaaatttctttcaaacacagacttagctctttagatgaaaagtcattaggcaggaatggaggtaagggctggtctaaggtctcttkggtgtctggattcactgaatttcaatgatgatacagtaaaaaaaattgtaaaagagcaaaaacaattaaaaatagatgtgtagttatatttttcttcttacatagacctaacttatgaaacacaaaagggtatctactccaagttgtgttattttcaaattttcaatactagctcatttagtattgtcattgcactagcatcactgttggtattctccagcgtgtgagatattaattaaactcctgtttagaaaagttgaagataacagctactaactgaggattattaattttatggctttaataataattttagtaacttgtgtctgctgtgttttatttttattttattttattttattttttgagatggagtctcgctttgtttcccaggctggagtgcagtggcgcaatcttggctcactgcaacctccgcctcccaggttcaagcgattctcttgcctcagcctcccaagtagctgggactacaggtgcataccaccatgcccagctaattttttgtatttttagtagagatggggtttcactgtgttagccaggatggtcttgaactcctcactttgtgacccacccgccttggcctcccaaagtgctgggattacaggtgtgagccaccatgcccagccctgatgtgttttattaattttttggaaatgactgaagtttatctgtaacaaatcggtattgattcgaaggccagtcacagtggtttatgcctgtcatctcaacgctttgaaaggctgaggccagaggatcgtcggagccaaggagtttgagaccagcctgggcaacatagccaccccatctctaaaaacaaaataaccgagtgtgatgacacatgctacttgggaggctgaggtgggagggtcacttaagccctggaggtcaaggctgcagtgaagaatgatagtgccattgtactccagcctgggtgacagaatgagacccttctcaaaaacaaaacaaaacaaaaacaaagtgaaataccaggcacggtggctcatggctgtaatccccgcactttcggaggccaaggcaagcagatcacgtgagatcaggagctcaagaccagcctggccaacatggtgaagccccatctctactaaaaatgcaaaaaattagccaggtttgctggcacatgcctgtaattccagctactcaggaggctgaggcaggagaatcacttgaacccaggagggggagattgcagtgagctgagatcgcgccactgcgctccagcctgggcaacaagagcaaaactccatttcaaaaaaaaaaaaatgaaaaaaatgyttaaatgtaggactggattaatgaaattcaaagacacttgtgcttcatgcaaacatagtgtcactttagcatctgtgataggcaagataatgccccaatctcttctaccaccccaaagttgtccacatcttatccttgaaacctgtgattatgtatgtaccttgcatggcaaaaaggactttgcagatgtggttaagaattgtgagatggggagattgtgctggattatccaagtgggcccagtgcaagcataaggagtctttataagagggaagcargagggtcagagccaaaaaagtagatgtgacacagaagcagaggtcagaaagaggggtggagaagagagagagatttgaagatgttgtgctgctggctttcaagatggagaagggggctacaagtcaaggaatgcaagtggcctccagaagttggaagagccaagcacaaggattctcctctagagcctccagaaagaaccaaccctacttccactttgattttagcccagagagactgattttggacttctgacctctagaatgaaaaagtaattaatttgtgttgtcttagagcactacgtttgtagtaatagttatagcaacaataggagactatatcgtaagctgaatttagtatgtctcctactataaaatctacctttttccttgcttcactgacttggtgagtccacctaattctgatgcctaaagtcagatacctgggagtcattcttgacactactgtcaccattcatgtccaaatctgacctgtcattcttccttccctgtagctcactggtccatgttctcttcactcacctagacaagtgtgtaatagcttcccaattcattattattattattattatttgcctctagcctccaccttttattcattctacactttgttcccagaatgatctttttttttctttttattattattatactttaagttctagggtacatgtgcacaacgtgcaggtttgttacatatgtatacatgtgccatgttagtgtgctgcacccattaactcgtcatttacattaggtatatctcctaatgctatccctcccctctccccccaccccacaacaggccctggtgtgtgatgttccccttcctgtgtccaggtgttctcattgttcaattcccacctatgagtgagaacatgcggtgtttggttttttgtccttgtgatagtttgctgagaatgatggtttccagcttcatccatgtctctacaaaggacatgaactcatccttttttatggctgcatagttttccatgttgtatatgtgccacattttcttaatccagtctatcattgatggacatttgggttggttccaagtctttgctattgtgaatagtgccgcaatgaacatacttgtgcatgtgtccttataacagcatgatttataatcctttgggtaaataccagtaatgggatggctgggtcaaaaggtatttctagttctagatccttgaggaatcgccacactatcttccacaatggttgaactagtttacastcccaccaasagtgtaaaagtgttcctatttctccacatcctctccagcacctgttgtttcctgactttttaatgatygccattctaactggtgtgagatagtatctcattgtggttttgatttgcatttctctgatggccagtgatgatgagcattttytcatgtgtctgttggctgcataaatgtcttcttttgagaagtgtctgttcatatcctttgcccacttcttgatgtggttctttgtttttttcttgtaaatttgtttgagttcattgtagattctggatattagccctttgtcagatgggtagattgcaaaaattttctcccattctgtgggttgcctgttcactctgatggtagtttcttttgctgtgcagaagctctttagtttaattagatcccatttttcaattttggcttttgttgccattgcttttggtgttttagacgtgaagtccttgaccatgcctatgtcctgaatggtattgcctaggttttcttctagggtttttatggttttaggtctaacatgtaagtctttaatccacyttgaattaatttttgtataaggtgtaaggaagggatccagtttcagctttctacatatggctagccagttttcccagcaccatttattaaatagggaatcctttccccatttcttgtttttctcaggtttgtcaaagatcagatagttgcagatgtgtggtattatttctgagggctctgttctgttccattggtctatatctctgtttttgtaccagtaccatgctgttttggttactatagccttgtggtatagtttgaaatcaggtagcgtgatgcctccagctttgttcttttggcttaggattgacttggcgatgcaggctcttttttctttccatatgaactttggacagactttaaaccaatgacgatcaaaagagacaaagaaggccattacataatggtaaagggatcaattcaacaagaagagctgactatcctaaatatacatgcacccaatacagcagcacccagattcataaagcaagtccttagagacctacaaagagacttagactcccacacaataatcatgggagactttaacaccccactgtcaacattagacagatcaacgagacagaaagttaacaaggatatccaggaatggaactcagctctgcaccaagcagacctaatagacatctacagaactctccaccccaaatcaacagaatatacattcttctcagcaccacatcacacttattccaaaattgaccacatagttggaagtaaagcactcctcagcaaatgtaaaagaacagaaattataacaaactgtctctcagaccacagtgcaatcaaactagaactcaggattaagaaactcactcaaaacctctcaactacatggaaactgaacaacctgctcctgaatgactactgggtatataatgaaatgaaggcagaaataaagatattctttgaaaccaaagagaacaaagacacaacatactagaatttctgggacacatttaaagcagtgtgtacagggaaatttatagcactaaatgcccacaagagaaagcaggaaagatctaaaatggacaacctaacatcacagttagaagaactggagaagcaagagcaaatacattcaaaagctagcagaaggcaagaaataactaagatcagagcagaactgaaagagatagagacacaaaaaacccttcaaaaaatcaatgaatccaggagctggttttttgaaaagatcaacaaaattgagagaccgctagcaagactaataaagcagaatgatatttctaaattttctgcttaacagccttgaataactcttctttgacatattattgtcaagctccttagtatgaccttgcctttgtcgtgctgtctagtcacacgtctctctatatcccacaatgtattccctgtttttcttttttmtttttttattttttttttattttgagacaaggtctcactctgtcgtccaggctggagtacagtggcatgatctcagcccactgcaacttctgcctcctgagttcaagcgattctcctgcctccacattctgagtagctgggactacaggcrygcaccaccatacccggctaatttttgtatttttagtagagatggggtttcaccatgttggccagactggtctcgaactcctgacctcaggtgatcagcctgacttggcctcccaaagtgctaggattacaggtgtgagccaccatggctggcrtgttcctcttattctgctacattgaatttgttatagttcccaatacgtatcatgctatttaatgtctctgtacctttgaaaatgctgttttctttcctggcatttttttctcctctccttctagttttaccacttcttttatattttgtaagaatttgtttaggccatgtgtagtgaygcatgcctataatttcagcactttgggaggcaaagggggatggatcacttgagttcaggaattggagaccagcctgggcaacatggcgagaccccaaatcccatctctacaaaaaatacaaaaattagcagggtgtggtggcgcatgcctgtattctcagctactcgggaggctcaggttgggggaggatcacctgagcctggggaggtcgaggctgcattgagccaagattgcgccacttcactccagcctgagcgacagagcaaaaccttgtctccaaaaaaatttgtttaaatgccaccatccacaaggagccctcccttaagtgccttcccctgttttcttctagtgccatgattatatttatatcatactgcttcttaatctgcaatgtgaattttgggctgcttcaaataactaatatttttgagcacctacaatgttatgcaccatgctaactctaactcataaaatagtaatcaaaaaagacatagttcttgccctcatacagctcagagactgtagggaggacagatattaagaacataattataagtactccaaagaagagatataaattatatataggtattagcaggaggatctaggggatcaataatctgtttttttttttttttttttttttttgagacggagttttgctcttgttgcccaggctggagtgcaatggcgcgatctcggctcacactgcaacctctgcctcccgggttcaagcgattctcctgcctcagcctctcaagtagctgggattacaggcatgcgccaaccgcgcccagctaaatttgtatttttagtagagatgggcttctctatgttggttaggctggtctcaaactcctgacctcaggtgatcctcctgcctcggcctcccaaagtgctgggactacaggtgtgagccaccacgcctggccagggtcaagaatctttaggctcagacatttctgtctccccagtagaccacgagcagcttgcattcagggaggagactatgttggtcctaatgggaagctacgggggaagataaaatgaaagagtacacaaagaaagaggaatactcaggacccaggaaacaggagaccagcacaggtgagaggtagagagaagtcccaggacagcagctgtgtgtgacagagaaagccacaagtcctgattggtagaagaggtagaagactcctgaatggctgtctccaaggagagataattgatagaatacataacatgtttgaaaaacatgttgagtaaagacttacatttctagaatacagtatacggtaaattaatataagatagaaaactaagcaaataacaaaaataytaagctgcgcacagtggctcacacctgtaatctcaacactttgggaggttgaggcaggaggatcacttcaacccagaagttcaagccagcttgggcaacacagcaagacctcatctctactaaaaatagaaaaataaggcggggctcagtgactcaagcctgtaatcccagcactctgggaggctgaggtgggcagatcacgaggtcaggagatcgagaccatcctggctaacacgggtgaaactctgtctctactaaaaatacaaaaaattagctggcatggtggtgggcacctgtagtcccagctactcgggaggctgaggcaggagaatggcgtgaacccaggaggcggagcttgcagtgagccgagattgcgccagtgcactccatcctgggcgacagagcgagactctgtctcaaaaaaaaaaaaaaagaaaaaaagaaaaaagaaaaattagctgaatgtggttgcacgcacttgttgtctcagctactcaggaggctgagactggaggatcacttgagcctaggagtttgagattacagtgagctatgatcacatcactgcactccagcctggatgrcagagtgagaccctgttttaaaaaayaaaaaataaaaaaagcagattctcctcttcatgataggaagttgatagatgtgtaaaactgaaaactttttcaggaaactgctgaaggaatggcaagcagaaaaaaaaaaaactttaaaaaatagcagtattagcaaggatagaaatggctgtaaataccaaaagaaaccgaaaaaagtgttgaaagtctttggaaacaagaattggggggakggggaggagtatggaattactagattactgttttaatactaaactatgcagaactatgtattttttttttttttttttgagatggagtcttgctgagtgcagtggcacgatctcggctcactgcaagctctgcctcccgggttcacgccattctcctgcctcaacctcccaagtagctgggactacaggcgcccgccaccacgcctggctaattttttgtatttttagtagagatggggtttcaccatgttagccaggatggtctcgatctcctgacctcgtgatcygccctccttggcctcccaaagtgctgagattacaggcgtcagccactgtgcccggccagaaccatttaattttttaaactatgaatatgtaaatagataaagacattacattaaaattttctgtgtcaactgtaaagtgactgataaaggctcactattattaataatattaacaataataagttgtttcttcagttagtttcgtacaatgttctggtacaaggtaatgagatcacacatcaatatctggaacacagcttggcatacagtaaatgctcagtaaataattctttctttcttccagtatctttaaataaaaatacctaaaaacttccttcatgttaaaacacattaaaagcaataaagcattaaaaatttcctgccaataaaatgtagatttacatttattttgtgtttgaaaattgcttttaaataaataaaacagaaaacagtgagccattttgatttttttaatctactaacaatgttttgtgagggaattattgtaatttaaattaggttatttttaagaacaataatttaatactaaaaaattatgttttgtggctaaaaaatggaaataaaataacttacaattgacttaaattgcrtcatgtttttccaaaccaatatgatggttaccaaatcagaaggaaaaacatgttaatcatagtgtaagcttttttcctaatatggtataaacaattttaaagttcttactgtatgacgtctcagggtgtgtatttacttaactctcagaggaagattagtaacatatcatgtgcctctttttctctttttttaaaccagtgttgctatctgggctttatttggagccttgaaaagtccaggctccttacattataattaggcaatgatgtaatctgatctggatttgtatctgaggtaatcacaggcagtttcacagtgatgtttgccttgagttttgtgcttcaggagtaaattttcatggaaaagaagaattttctagaaattctgttttaaatatcttttgtgaatttcacagatgttctcaaacaatgtagtattacttgttccataaacccatgttctccaattcgatatcaactatcaatatcatctaccaaggtcagccacctatgaaggataagtggttcttagaaggttcctaatgttcaatctgctctcatttgcaatctataattcttcattcacatcttcacacattctgaatgttaatattgcatagcctcttagaatgcaaatggcaaaaacatacaaatgatgatggtcattcactacctaaccctttcccctcaataactgcctggtatcaggaaaagggagctttaatggggaaagaagaaggataaggagtgtttgtgtgctactgatggttggtggctattgaaagcctgagttcagaatgggaggctgtgtacatatgagaaagggggaagaaagatgaggaaaggaatgatgttggtccctaagataaagattaagagggtatgttaattggaatattgggacagatgagaaggttaaatcctgttttatttatttacttgtttgcttatttatttatttgagayggagcctcggtatgttgcccaggctggagtgcagtggtgcgatctcagctcactgcaacctccgcctgccgggttcaaatgattctcctgcctcagcctcccaagtagccgagactacaggtgcacaccactacgccccgactcttttttttatttttatttttagtagagatggggcttcaccgtgttggccaggctggtctcgaattctgacttcaggtgatcatcccgcctcggcctcccgaagtgctgggattacaggtgtgggccacagcgcctggccaggatttagtttttcatacaaatctgtttcaaagattcttccaacatttcctgtaagttgccgaggttgtgggagaacctgaaagtagcttctgacttctatgtaattcaaagggcctaattatgcattctatgctgtagctttaattatacctgttaaagtatacccctggctgacagatagaatggactcctcatggctgaggtgctcaaaaacagaactatgcagccatagctggacgaggaagcagtcacatattctgttctcagaaagatgtagaagtatcactggatctccctttctgcaatcaagcctgtgacgtctgagtttgggcttggraaacgaccaatcagagctcacctaccgcagccaatcagaaaccagccatattgaccgatcagaacttagctgcaccaaccaatcagaactaagcaagtttgaatcctttatttgccggaagctgggcaggaacttgaaccctctctttgtttaacgaaatgcaccttcattttgcaccaaaggctgtatctcccagtttgcaaactgttcactggaataaagtctctttcttccaaattccttttcagagaacttttgttcacataagaaaaaattaattttaaaattgtcttcctcattaaaaattggttcagctaaggctttatatgaaaatagtgttcttttccattgaatacaattttgttggctgggcgcggtggcttacacctgtaatcctagcactttgggaggccagggcaggtggatcacctgaagtcgggagttcgagaccagyctgaacaacatggattaaaccccgtgtccactaaaaatacaaaattagctgggcgtggtggcgcatgcctgtaatcccagctactccggaggctgaggcaggagaatcgcttgaacccgagtggcaggggttgaggtgagcccagcctgggtgataagagcgaaactccatctcaaaaaaaaaaaaaattgcttaatttctgttttcatgcctgtgggtatttgccctgcaacactgcagcagttttcaaaaccaaagtttctgaactccttgaggaattctaaaaactccctgaaacgttttattgccatgtctctatgcttttatttcgtattaattatggaacacgtttgctaagtcacttcctgagcataggcagctcctctcactctgctcaggtcagtgagttagttgatatgtgtgcagatgcctcaggtacaggctgcagggatggctcccggcagggaagaactgcccttcctccacgagtcccagcactgccctacattgaggccttcctctctccactgtttctgctgctgcatttgcccccaccagtctaggcttaggtgcaggcctacccaccttggagccctatggtgcccaggatggtcccaaggcatgttaccaggccaggtcaccaggatgccgggttgcttgatgacttccatgctgctgttgagcatgctccatcgtcctatcatattaagctaaaaacacaagatcaaagataaaattgttaattattccaagatagtgtaggtctttctgagtgcaaggctgtgcatgaagctcatacacccatgatgcatcacctgcctacctcttacatgctttatgggttagttatatttgccatcactggaggtgccagtaaactcgcaaggtagcctttgtgtgaggtttggtaaccaaattgccaagttagctcagggaactgcaactcatgtccacctttcatccacttaggccttgctgtcttccctctttcaggtttcagttttgtagattttgagcctagattctctttctccatctcttagagcacaacctaagatagcattttgatagtctaagctcctggtctggtgtaactgcttccactcagaaatacttcctcttctctggaaaggaagggatcaaacaatagctcagtaagaacataattatcagatcaggagtgcctgcagatgtaaaggttctgatgccagaatatggaggtggagggagtggtcttgggatagtgcaggggatggggtttggggcatgagagtgcacttggattacctgattataaatggcagcacaatgaatttttaatataaagttacagctttaaaattattgagaaagattagttgattggtgtcactctagtcatagaaaacatacaaatctaattctgattttgtgccaacagactattatttttgtgcttgcacacttattgtatcacatgcatctctatccatccatttatccacatatctacaaatcatatatctcaacactgtaaaaaactccagttccttataaattactattttattttctcttattctaagcttccttcctgtaacttatttaattgttaacaaaatgtgttatagaaacctgtgttacttgttctgcagcccatttacgggggagaagatattatgtttccttggtctatgtttcaaaggtatcaactctctttgttcctgtataactacttacatttgaagtgaaaaactcccagaggccaacagaaaatggctatgaaactagaaagaatactattctacctacgctagtatataagtttcctaagatgttagtgaaatacagctggagaagtgcttcagtttggctcagttttgttttggcccaactcttaccaatagctcctctccaatctccaggagatacgccgtcctatcggtgatgggggaggagcaggagtgaaagacaggatggtgttgcaacaattcaaaaccccagagcgcacagttacccccaatgcactaatcagggtgtaggtactataacttactaagcctgtttaataaatccatgcctgtactcaggtgaatggggaatggtgagagaagagagaacactgtgataaccaaccagctcgaacagggaggggcagccagcccaccgttgcaaggagagctgggcagatgtctatcaagataaccatttctgctgcctgctgattctctcacctgccagtttctgcatctgcccatagagtactcatgtgctccttcctgtaccagatgatctccctggacttaatttctttttttttttttttgagacggagtctcactctgtcgcccaggctagagtgcggtggcgcgatctcagctcactgcaagctccgcctcctgggttcacgctattctcctgcctcagcctcccgagtagctgggactacaggtacccaccaccatgcccggctaattttttgtatttttagtagagacggggtttcaccgtgttagccaggatggtcttgatctcctgacctcgtgatccgcccgccttggccttccaaagtgctaggattacaggcgtgagccacaccgcgcccggcctggacttgatttcttgattgcctgcacctagagtatccatcgtctttcctacgtggctgggcaactaggtttatccctttcaggctagccctccttcattgccataacatctaggggtgacattgactgagttgtatatgattattcatcatttctcgggcctagatagattgtratgagttttagggcttgtcaaatttcaaggctctgtttttataccacacataattttgggaatttgtaaagtgcttaataattatccatcaatgagtaagctttgaaggaagattaaaaagtattatgaaataaattacagagttatagttgaggcttattcaragcaaaattatttttggtgtattttgagcactaggtaaatgtcaaaggcacccatgagaaatagcaaaaactgctgtaatagtataaattctcatttatagctgctgcagaagagatgcaaatgttctctatgtggttgctctgtgtgaggaggtgtttcatgggactatcaaaatcctatcttargttgtcattttggacactaaaaattttcaagtaataatttaaagaatcttgaggtttccttttgatatggcctagaaacctttggcaactaatttctgtatgactcaaaggatttcccctagaagggaatcctactatttgggcttttaaaaataaactgtcattctggatacatttgtagccctgactagtgggtgagcatgagtttcattctgaaatccagaaagaataatgagactaaaaaaaatcaagacactgagtacagtatattagttaatatagcatataattcaatgtttgctttagaattttgaatttagccaaaaaataattggatcaggtactaatgatcaaaatgagatcacgtgaggaattaaggagtgtacataagatcttggattacatgttacatagtcatgtggcgtaaccaaatgtatccaagtgtatttacatgtgactttgaattataatggcagagagttggtcaaggaagaagagtacccaggcacccagcaagttaacactggaaacagatggtaggagcggtttcaaattgagccaacttatttaaattacaaagagatcttcaagttcattttgctatccatagaaagcaataaatcacacctattaacttacctaattgtctttagctagcaatattagattcagtctcatactcctttaactttcatttaatagtgttattggttgagggtgggttgttgtccaggttcttggtgtttcgaacaaataattgaacaaaatgcacaaacaaagcaaggcagcaaaagcagagattcattttaaaccaaagtacactctaaagggtgggagtgggattgagcaactggcttaagagcataggtaacagaattttctggggtttaaataccctctagaggtttcccattggtttattctatgcaaatgaagtagtggcccactaccagtctgattggttgttggaggggaccaatcagaatgaagagtaggcctgcaaccagtctgatccattgcaggaggggaccagtcagaggtagtttcatttttcaacttcccctcggaaaaaggaggggctgaaaagggagtagcctctgatatccagtcagcatgaatgagccttaggctccctgcctccagaccctattctcctgcctcaatagcagtttgagataaaatgcaatgtttgaaagctaccttacagtgagttagtgatttccgtttaatatccttaatgtattacttcaaaataacagaatttattgaacaacacacaagtcaatttgcttattagcacattgttctctgcagaactgctggcgacctcattgcycyactttggaaaccacgttaatatactggggaaacagatttagttagctttgaaccatgatcacaggacaattatgaaaacatgcaaatttgaaaggctagactctgacaccacaaatttttaaaataattctccaaaaacatttgcatctaggatgtgacatgcttaaggagtgaaaatctaaactagcttttcctttccttccctgcttctgcaaaaagcatattttccccttcacatttgctgagcaatttttctttattatgcatattaggtcagttgtggaagaaagaagtctttttctagtaggattacttgtttcaaagcttagactagcttagattgagggtaagaatagcatagaactgtccagtctgagtagggccaagtttgccaagaggggttataggttatctaatgtgacataaagaatacccaggttaggttgggcgtggtggctcatgcctgtaatcccagcactttgggaggctgaggcaggtggatcgcttgaagtcaggagttcaaggccagcctgaccaacatggtgaaaccccttctctactaaaaatacaaaaattagcctggcgtggtggtgcgtgcctgtaatcccagctactcaggaggctgaggcaggagaatcgcttgaacccaagaggaggaggttgcagtgagctgagaccatgccattgcactccagcctgggtaacaagagtgaaactgcgtctcacaaacaaacaaacaaaaaaagaatacctatgctaacgtgctggtcaaaggcttggagctacaaataggatggagactggagatggcacactgagtttaaggacctagacctgagggaagaatttaaatggaatattgtgactgcaaggtggggtgttggctctgtcatgagcctgacacccatggcattactacaccctgcctgaactagttcttggccttcctgctgttgggaggaccagtatctaaatgtgtatcttcctgtgttagtgcaagttccactgtggcttagattgttcatctggtggtttggagcacacatcctgagagatgaacgaatggaacaattgttagtttattgacctagtcctgtgtgcctggacactgcaccagacaattgatataccttgactggtttttcattccctaagtctttaattatttggttttacaaatattgctatttcttcaatatgtgaacactgattcagacaatatgtgtcatttttctagtgcttcagatttgaaatctgggagtttattcattcacttactcagcaaatatgtattaggtatttactagtgtcaggtactgtgctgggcattgggtataaaaagtaaaataaaagaaacatgaccactatcctcatgatacttataatccaagggaaaaaattgacttcaaataaacaaatgcctacatagatatagatatataagattacaaattaagcagtaatttataataaatactgtgaaagaaaaatcggggggtatgaaaaacatgatgacgtaatttagattgaggagtcaaggaagacaactttctgaaagtgacatttgtgcagagacctcagaataggcaacagttagttagccgtatgaaaacaaggagtaaaataattgcagacagaaggaagggcatgagtaaatatcctgaggtgggagatggctcagtgggttcaagatactgaaagcaactggaacttggtgggcgagcaaaaagtggtaaaagatgaagtagtatttgactctttcccgttttcactcatcacatcaaattacaggttgagcatcccaaatcttaaaaccccaaatcctaaatgctccaaaattaaaaactttttgagcactgatatgacatccaaaggaaatgctcactgcagcatgtcaaattttgggtttttagatttgtgattctcaactgatayaacgcaaatattccaaaatctgaaaaaaatcataaatctgaaacacttcttgtcccaagcatttcaaatgaaggatactcaacctgtagttgtttttatttctctcttataatcttcctcccagccatgtcttcttttctgtttctttcctacccccaaactcaggctcctattacattgaagctaaatttctgtgtcagatttgtaactgagttatctgcctccatttcgtttctctccttgatccatttacagatcatatagacaagatttttaaaaaaatcatacttttatcaataaatctaaagttcaaagagatatttaggggagacatatagtctaacttactgtattagttgaggtaggtgaaccgcagttacaaacaactcccaaatctcagtggcctaccacaataaaggttcatttcttgctgtgtccgtctaatgcaggttggcagggatgttctctgcctgtgcagtcatttggtggctcatgtctcttccatttagtgggtcagtcatcccctaggtttttgactcttctgttgaatcagtctcaaatttctagaagacaaaatctgactacctagcttggatcagatgatttcctttggttctattaactgacatgggggaagggtaagttatgtacatcaaacatgggtgcagtagtcattcttgtgggttggggccatttatacagaaggggaaatgagctgggcagatcccatcaaaagatgtgttattcaggcagacatttttacttcatatattagatctttatatatttgaagaaaatcatccagtcttcttatttcccacaagctttattattttctcatgagaatgcatatttccgctttcttaggggcaacatccaggttattacagtagcttatcaactttcctaaaattcagctgtaaacttccttccaatttcacctgttgggtgaattaactacactcttaattaattattctcaagttctgaattcctgcatggcttgattcaatcaatcaagcaacctttaaccttgcttgtacagttgcctagcattaattttcagcttttcaaactccatatcttgccccattgaagatgaagaccatgtcttatttgccctttgaattaatcacaatataatgctgactgtattccttccttaattgtattcaaaaacttaataatctctccttcctcaggaatactttcatgtttacagaaggaaatcttcatttatctcttgattctgtgataagcattgtccttaattggtctacagaatgtgtcatttactctcaagaaatgcagactccaagttaccatgtattgaggctcgctatgtactgggaactctgttatgcaattttatacgcattatttaatcccacaacaagcctatgagatagttactattattatttccaagatcacacagctaatctaattctggaactttagtctcttgagtttccaagctcttgccttctttttcttttttttttgagacgcagtctcgctttgtcgccgaggctggagtgcagtggcgcaatcttggctcaccgcaacctctgcctcccgggttcaagggattctcctgcctcagcctccaaagtagttgggattacaggcacacgccaccatgtctggctattttttgtgtttttagtggagacggggttttgccatgttggccaggctgatctcgaactcctgacctcaggtgggctgcctgcctcggcctcccaaagtgctgggattacaggcatgagccactgtgcccggccttgctcttgccttcttaattgcaactctgtactgacatgcatgttaataaattggccaaactggcattctcactgcagctctgttsttttccaatccttgaacctctcattatggatgcctcatctcatcctgttgccttttccactgtgggttgtattgatcagaaagcagatctgtttatggaaggaaagaaaggtattgggtttagtagttattagaaatagaaatattagaataaagacaacattgaaagaaacagacaagagaaagaggatgaggttccccatgtttacattcctgtgactcaagagtgcagagagccaagaacaaagctgaagtttagccagggaaaggagagtgttcaactaaaattaactctgtaggcagcattcccagttgtttgagtttcaggatcccctcctcaatttcctaagaaaaacaacatgcaagttaaaaaaaaaaataaacagtagttaggggcaaagaaaccggtgtaattagggctaaagtgatctgtggtatctctaaatggtagctccatttagagaatgatctcagaggcagttttggaagggtttggatcagagcaaggaggagatcatgagtgcaagactataaactatggtctataaatcagaaagtttatactaaattcagaaactttaatgcttcttggggactgtgggcttgttaatatgctactggcctgattttggttaagtctaaggataaactggaaaatcattagtccatgtggctatatctgttctacctggtactgtagttgtgcagagggctgctcccacccttcagcactgagatcatggagctcgttctcttggtggttttcatgattgaacctggattaatagttactaattatatatatgtataactatcaatagtgtaatcatggttattatgaaatattgatataattattaatgcaactaactactctccctatattctctggtctctagtttctatcaaggaagactgagcccacacaaaggcttaggataggaggagaatcaacattcagggctgcctctgaaacccttgtgctattgtaaacagattcctctattcctccagagaaagttggaaagtggaaaagttgccttttgcttcttagccttaatgctccttctagtttttggctttaattgaaatcccagtctcacaggttaccaaagacattgttgtcatgatgttgtggtgatgatgatgggtaggtggtgagctgttgctcagctgtctgcactacaacttctaaaccaagaattgtccaactttagtgaacatcatcatttggagggcttctgaaaacacagatttctgagctccatcctcatttctgattcagtgggtttggggtagagcctagaatttcatttctaacaagttcctaggtgacattcatgctgctggcctggcaactacactttgagaatcattgttctacctcattactgattaaaatgctcaacttcctttgcaacccttggcaataacctataccatgcactctccaactaacagcccagtcgccacatatatacacttttggaagatattatggcaacaagtccactgtttcctttgctactccaacttctctataaccctaacttccactatttccaattctcacacttcctcaccacaacttcacctactctttgagcacaaggacagttttgtggcaggccgggtctcactaacacaggcctctgtaacaactgtttcagcactgacggagtggccaagttaaatattaaaagctgatcgagctagtgcccttatacaaaggctggaatgtaacaaaagcccaccaggagttttgctcaggcctttcctgggccttgaagtgtgacaagataacaaatgaattcttaacagaggcctgtttaggattaaacaagttttattggaggtctgaagaaactccccagacctccacaaacaagtttattggggggtctgaagaaactccccaaacctccatgatttagcaggagacaagataagggtaatcacccagcacctggacccattaggattaagtaaatttacsgaggctccagaggaaggtcttcaggattcagatcttagttatagattagaagaagttaatcacttatgtcttcagatgaatgcacactaacacacagacatatagcttagaaggtatataagctctggaaaactttgtaactttgagttggcctggcgatattttccaggccttttccctgtacccagttacagaaataaactgtcttctttcccagttcgtctgcmtctcattattgggctgcgagaataggcagcctgaccctcagcttggtccggaaacagtttggtcacctcaattcctttatttaattcaccttttgatctcttcttggcttctaggccttctccatactgccgaggatccatagttgattattagaattactctccattgggccgggtgtggtggtgcacacctgtaatcccagcactctgggaggccgaggcrggcggatcacgaggtcaggagatcaagaccatcctggctaacacagtgaaaccctgtctctactaaaaatacaaaaaattagccaggcatggtggcgggcacctgtagtcccagctactcgggaggctgatgcaggagaatggcgtgaacccgggaggcagagcttgcagtgagctgagatcccgccactgcactccagcctgggcaacagagcaggactctatctcaaaaaaaaaaaaaaaaagaattactctcaatttacttgcatccctatatttccatcctatttccaatgatcaatgttaggtcattgccacaacctgccttctccatttttacactggttggggagggagtgataaagttgataagaatgtaaacacaaataaccacaatatacagcaatgtcccatttaaatcataagcataatacagaaattcgtgaacttgtaaaggcaggaaagagaacatctagttagaatgatcataaaaaaacttcaaggctattatggcagatacaaatatgaataagacmctactagacttttttaagcccttaagtataggaatggcataatttatattcatttcactgatagcaccaagcgcttttcaaaagagaattaatgaattatgtctcctctagtgtgattctttatctattacacagtgcagtgtgaaatgccctaagggggcttaaatgctgagtaaacaaatttttaaaagcaatttagacacgcacacacacacacatacacacacacacacacacrcacacattagatgtacaagcatagaaaagtcttggaaggataaatactgtcttgctttatccatcagcatactgattacagttgtgatgaggtaagtacccacaccttttgtaatgtaaaattgtgcagcaaaacagcaaaaataaaatattacttgggggaaaaagacaattaacttgtttttggccaaaggtgatagaaacaataatacttgcatttcctgaggccctaccatatgtcaggcatatgccaccttatttacccctcaccatcaccctacagggctatattatgtattatcttcattttgcaattgggaatagttattgtatttcttccattataagatcaaatttaaaaatactttaaatcattggaatgtgtatgcatgttatcatttatggtgtcttagacttgataaaataacgtaagtcacattattataaatcattagatataatattctaacttatggtttaattggctctaaattctgtgcttttcctccattggattgcgttatcttttctaacaaaagtagacttttgctccttctccaagttttctttctctctttctctttctcttmcacacacacacacacacacacacacacacatgccatgcaggcacacacacacagtttttcctttctctttctctcactttcacacacacacacacacacacacacacacatacactcttacatcttagtccaaagtaaaaatatcctgcttatcagatgctctgccttattttcaaggcttatgcttattttgagtgtagccatggtgaacttcatctatctaactgatgtgctagtctagtctcctacctactgctaaattactcaattaacctattttgttcaattccattttagccacaaccctttagtttcagttgccttgacattggggaaaaaaaccctaatctttcttatctatttggttaattggccaaattaattctgacagatatcacataggtatttttgtttttcttggggcagctagccaccctgggccagtgcttctcaatctgggcacacaagaaacaactggtgtatcttcttgaagcaagagttctccttgaagatttacttgaagagaaagtkgaagcaggacactgaaaaatgtagatgaaaatctttgaaagaagtattttttatcttaaaagaaaaaagaaaatattatgaaacagaataaaatatctgtaggcattttttttttttttttgtgagatggagtcttgctcttgttgcccaggctggagtgcaatggcgcaatctcggctcaccgcaacctccacctgctggattcaagcgattctcctgcctcaggctcctgaatagctgggattacaggcacccaccaccaagcccggctaattttgtatttttagtagagacaggatttctccatgttggtcaggctggtcttgaactcccgacctcaggtgatctgcccgcctcggcctcccaaagtgctgggattacaggcgtgagccatcgcgcccagactgtaggcatttttaaggcacaactttaatggaattttgaactggtggtaaactactcatggtaacctgtggttgaaaccataggctttggggcaagacygaaacctagctcctcccttttctaactgtaccctggggcaagttgcttagcctttttgtgtctccatttctcatttgtaaaatgggaataatatcatctgcctcatagagttatcatgagaattaagtgaccagtatatgttaaatgttggaacagtggrtcgttcatagtgaattctccctaatgttagctattttcattttcatttatatttctagatatcccaagggttattattttgtcctcctcttttgttaagttgtctcagagcaaaagtttgagcagccctgccttagtccttccccaggattctctccagtatgctgcacttggttctcatcggctggtcttttgtaatgtttcaggaatgcactgttttcctttttctcttctctgtctcttttttttccagcaccattaaaaacaaagagtagctgttttaggaatttgggaagtgaagaaacaagacattcgactgtgagtttcacccatgtttaaaacgaaataacctaacaatcgggagtggcgtgctaccgttaagattttggaggtagagacgtgaagattttcagtcgcaactccctttagaaccatggcttgaacccgtaaagtatgagggctgcccataaaactttctcttctaagatgtgggatatgtgtagtctcatctagttatggctcatctgggaatggattttctgacgcaaatgaggtttaaaaaaaaaaggcatagtgtctctttatttggttaacactatttctgcactttgtttttccttgtcagctttaaaaggaagagaacaaaagccaaccaccctgccaaaacttggcagtagaatttcagtgagtgaaaattctccacctacagtaatgtttgaagtggttgcacagtgagggccccccagcccccaccccaacccacccacccctccactgcaggccattcttgacctgttaggacaccatcttatgcaaagttaagaaagcccaagagcctagaacccacagaaaaaggccagtgtaagactaagggcatctatcccctgttcttttttccctgttccatctgatattatctttggctcaatagtcctagaactcagaaggctgatactccaatgtaccctagaattgctagactcaactctaccatctcctccgctcccagaacctggactcttggagggcagacagcaggataggagcagcctcaaggacgggaaagcaatggagactgacctatcctttgctatttccctttgccaccaatatcttctagttataggatttttgcacctagaaataaaatatacaaatattgaccataacttacagtaattcagtgcttctaagttcccatgtaccatggcaaacacatggatatattatagcaacatcataaaacagacatgattatttctataccaaggataaatctcaggtttagaagaaaggttggaaaaattcttgaaggtcacaagccagaagtacatggcactgaaacagatctgactcttgagtccaagcctattgtattgacttgctatcaatgcataacaaaccgcatcacacaaaaccagtagtatctttgagtcatcttgggggttggctgatttaagctgggctaggctaggtggctggggtagctctgctctatatgcctctcatcttcctcctgggaccagtaggttgccctggacatgtgtaagaagaaaattggaaatatgcaaggtctcttaaggcctaggcttggaactggcacactaatttctgcctcatcctgttcgtcaaggcaagttacaaggctgagactaatgtcaaagagcaaagagacatacctcatttttttttaagagataagggtatgcctgttgattaggttgtactcaaatgcctgggctcaagggatcatcctgcattgctgggactacaaatgtgcaccactgtgcccaactgagatatacttcacctttgtggggtgtagtggatgctgaggtgcacttcctggtccctttccagaaccaaggcacttactttctcagctgctaggaatattgcttgctgatgatggctcaccaagtccactgactcccatcctttcacctccaccctcgccctggagtccccatcccactgcccaccaggaattgtcctcagctgaagggcactgctttgcccaagggtgcccctatggtcaacccacattcaaagactagtcagatgtgagtatgaagtctgacctcttgcctcaattcaagacatctctgaagagctatcctagcatcagagcttcccataggattgggtgaggcctgggttgcaattaaattagtcccatttttttctgtgtcaatcttgcttcccctattcccttaaaatggctgtttccaagagcattcctcaataattactcyatgaaatctaaccttcaacatgagagggactccaaagccaatggtgaagggcaaagatatagtataggaaagaatcaaaaccaataacgcaatctaccacatctttgcatttaagaagtagattaaactgcatcccaggtccaaaaacaaaagcatatagtrgagcagacagaatctctgtctgacatgtcttaatgtatatctaaaccattgatattggaccttgaaatatatttgacttggaaaaggcatgtggtcctgaagagttgtgggcaaatggaaactttgtaaattgaattaaattccaaatgcatggtgggggtttggtattctaaagtgaaaaatgtggtgaattattttatgaataaccattttaataacattgatttttctatgatgagttttacatatcagcaatttatttcatttttatgaacccattctatttttaaaataattctgtgtgtgtgaaattatagcatgatgtcatacgtttgttttttggtctccaatccttggtggatttcctttgcataaattttaagtttacatgaacctgaaaagattccagggactctgggcaaagccatgggtgcatggttgttggaaatgggtacaatggatataagtagccgggcagacaaacatcccaggagaagaaattttggccaggtcatgttcctttgtccagtaaaaaaagcaggaggagagaaaatagataatttactgtactcagggatagggattgataaaatagctacagcagaaggaaaagtcagcaggaaaatcaagaattctaacagaatattgcggatatgactgttcatgatctccaggggtatgaagggcaagccaggctaaaaagtggaccagaacactggtggttgagggattggaggccccagtgagaggagggaataggcacacagcagtgacagattcaatggaagtttttccatatttatgatatgcaagccatgtgtattttcatttccctcatgcttttctgtgaaggttgaggctctcccatgtgatagtttcctctatcagtcaggattctaaatattcttgatattttaaagaagagatttaataccaggagatgacaaaggtaagaagcctaaagtgggagagtaaggcatccttgagattatcaagagcaggaagctgctaccactgcctaaagcttaagggacaaaaggagccaggccaccagggagaagttggaaccacagaagctcttggascaagagctgggtccatagaagagatggccgctgccagagacaatacttgaagctgagagaagtggggaaaaatacccagcttctccctttctgctctctcttcagggccatccaatggctgaactgacccagaaaccagagggcaaaggaacaaggaaaaagtaattctctgtgatacggaacagggtagagcggggacaggggataaatctaagagcaaaayaggacaagactagcacatggcctcaacttctctgctctccatggcaatgtcttcctcctcttctgtttccaggagtctctaattcctgccacttattgccccaggctcccttgatagctggtttccaggtgggggcacagccaatgggtggcagcagcaggagactgggagataaaaggaaaggttgggttatttttccccattccctccctgctttggagccacctctctggaaggctccctccaccattatagatcctgctggtggtctgtcttccgtggctccaggtctcaccagctctcaccaggtctctctctaggagtggtttccttctattgctggtctctgggtgtctcaacatccyttgctaattcccttaattctgcccacagctatgtcagcagtatctttgttaaagtcccttcatttgaacaatttggcttgagttctgttttctgccagaaccctggctagtatcctgacctactgtgttcttttccaagctcctttcaagtgtcatattttccccactgttgcccagatcaacagtgtggtatagtagaaagaatactggacttactggcagacagacatggttttatttctgattcagtcacttacagagttactggctgggaaagttatttaacctcctgagcttccgttttcttgctggtaaagtggaaaggggataatgatgaatttcagttggatatattagaaatccgtgcctgacccatgtgttccaggcctcatctgccagttgtctttttttttacataccgattatttatggcgtaaatccccttcctactcgactgaaagaaatgaacccccttcaaagtatttccagttatttctagaagtttccaaagaagttcccttgctcaccagtcgttctttcacagttgccatcgtcttctgccctgttattttgcttctgccccagctcccacatgtccagcttctgcttgcagggccacttgctgaggctttgccgaggctgaaacttttccagggtcactgtccatcatgagaacacagcacatgccaagggtgttgcctcttagtgttcccaaagagtctggtccttgggaagcctccatttggcctctgtggtgcagagaggagaatgtccttccctggctcagccccaaatagctgggcttgtgcctagagcctctgagagtctctttgactatttcctcagctaatttcacatgtaaacaaaacaactcacagaggttctgcaacctgcttccaccgtctttctagaaggaggtcagaaagggaacagatgctttgcccttttcccctctcccctccacagctctcccaacccccaaacccatcttcctcttctatttgctaaactaaacattttatacttatcaaccactgtgggatggaagtgggatggtcaaggagggaggtgaggtctagatgacttctgtatatgagccagagtccaatccatttatatatgaatgactcctagtacaatatctgacacaaagtggattctcaatggttgatgaatactattatcacgtaaataggaaaccacatttcctaccatttagatagtataagttcttcaaagttcaatttatgtgtcatttcttaccagaaacctggccctaatcccagtaggatgaggttactctttgcctctgtatttgcttcttagggctatggttataatataccaagaattggcttaaaacaacaaaaatttattctctcacagttctggaggctggaagtttgaaatcaagacattgatagagccatcctctctctgaaggctgtagggagagtccttccttgccccttcccagcttctggtggctcttggcaatccttggtgttccctggcttagagccgcttcactcaaatctctgcttctgatgttgcacagtcatcttctccctgtgtgtctttgtttccacgtggcattctcttcccttataaggccatcagtcacagtggattgaggcccactctagtaacctcatttaacttgattatatctgcaaaggccctgtttccaaatgaagtcacattctgggatcctgagagttgggatttcaaaataccttcttggggggtgcaattccacccacaacaccctgcaataagattttaaaattgaatagcagcaatcttatttctcttttgacatctatcacatctagcttattttatagtaatctatcttttatctccccctacaacactgaacagcccaaggacaaaacctgtttctgattcacttttgtgtccctgacaatacctacatgtcccataataggtttgataggtactaagtgaccgggctgaggcttgcaccctcccctcctgactcatgatcaatccttcagactagagcgtgctgccaccagcctggtacatgtatttgtgagttccttgggtttcaactccttggttgatttattttttgaaaacactatatatcaggaagatgggtttggctagctgaaatagctggttatagcttgccttgggtggttaaatatttatgtcttctgagagtgaacaatgggctttactctaccagggaaataatcttgtttgtccccatttattggctcttttttcctcttttacattttcagcatcctaatgatgtccttagtgatagttgctatggaagtattttagtgttttctgcagtgttgggtggtgcagtacctgaagccytctttagtgtgtatttataatgacaccaagccatgaatttcattttagtggtagctttcttgcttaataactggttgtcgtcgggggagtggtctgcatttattttggcctcctgatttatcgcactgatttttcttctccttttcattgttcctggagtgctcgtcatcacttcaaatactcaacccattatttcacagaatataatgacagagccagccccatcattttatcattgaatacactggtaaacagttgcaacccctctaataccaatgtgatgaggggtgatttaaacttgtaaaagtcaaacgctttttttttttttttttttttgcgatggagcctcactctgttgccaggctggagtgcagtggcacagtcttggctcacggcaacctccccctcctgagttcaagcgattctcctgcctcagcctcctgagtagctgggactacaggtgcgccccaccaagcccagttaatttttgcattttttagtagatatacggtttcaccatcttggccaagatggttccaatctcttgaccttgtgatctgcccactggcagatcttgtttgtccccatttattggctgggattaaaggcrtcaaaaacttttaagaatgtatagtttggagactgagactcagtaatgggtggaggagagaaaactgggatwtctagagaattggattgtgatgtcttccgtaaaatagtaatagtagtacatgttctacctacttgataggattgttatgagggtcatgtgattaatgtatgtgaaagcaatttgtaagctgtacagtgctataaaatgtttatatatgttatcattaataacaactagattgttaatagtcctgattgcttttgacctggatgtctatggagaagcagcttaatctctggtgaagacatgacttgacctttttactgaaccatgtgggcaaatgatcaggccattatgcagtattttcaaggccatcaggttgtctgtgttagcctctttcattcgactcttaccttttatttggggaggagaagggacagtatgactttaattattaagctgaagaagtggagaaatcttgatttcttgaatagctttttcaagtcagctctttaatataaagtctctctggtgcatctgttgctagcttgccacgttggtatgtgccattttaattttgttcctccaaaggtttgggttatttttccatacactttggtttacggtagacgctcaaccacttactagaatagaacacacttaggcatgtagactttgacaattctagggaaaagttgtgaatgcatttagtgatttgatttgtgtgttttagtttaagtaatctatcaatttatcctatagatagcccagaaattgatgtcactgcaattaaacagaatttttttataaagaattctgtgcctgacaactctagacatatttattatgcagcttctcttaaaggattttcaatttgctcattyrgagcaaattttgtgtgttaaatgcagttggttcctagacactgactcattttccaaatctgagtacactttttcctcaattgactttcccctgccagtatgtcatccaactattctttaatgtactgtcaaaatatggtcacctcatcattaacaggaaatgggcttcttgcccagtcttwtgaaagtagaataaaatcagacagtttgatttttaaactataagaaaaggagaatgaaaaaacagcaaaacttaactaatttccaagctcagggctatttataaagagcttgaacaaataagacacccagaaacgaaaggaaaactgcaatttgcttggctttgtgtagaatacagaagaatttccattttactctaaatataaagtagctgcaatgtgagtcaacataaataaaacaaagaaaccaagtctttatggaagatgacagcagtttcatgtgggcagcttcatgtgtttaagcatctcaatgtgaaaacttggccatttgctcaagattgtttctctgtatttagatttttggtgcaaatatcatctctgtctctaggaaacaaacccagacggcctacagagtcaagaatgaagaattcattttactgaaatgytaatgtcaactctraaaatatcagagttttcaattttacctaatcaaataatcagctcgacaatttttttgcaaccacagttgcttatagggctgaccaaagtgacgatttgtttaagaccaagttcaaggttagttaaacatataacatatagcgcagatttcatttaaccatgtggataattcagccaaatatgtttttcatgaattgctgtgaaaaagagtaatttgccgcatttgaattatctgattacctgtcctgatcttctacttcactttgagtgtatatgtagactttattagaataacattttgtagtgtaaaaatagtctatgtcgccacagcttctctctacttgctagttcaaagctttctctttaatttttgatcagtgccaatttggaaccgatctcttttagctcagtttcctcatttgtggagtgggtatcttaacgtccaaaataataaatgattaaaaatagttaaaaaaagttaaaaataaatgattagtggaatgatgaaaagtacttcacacagaatccagcatatagtgaatgctcaatgaattttaactattttgacttttactgttaaagatgtgacgtgggaagtcattaaaccttttgtagcttagttctttaggtatgaaagacaaatgtcttgatataagtctaaaaatgttcttaaaatgcatgcagtgcctccacatgcaaagtgaagcacagaatttaagtaattaccttcattaattaatcaatgcattgctttacctaataggttgatacatgttttagagcaaagcttgatgcacaaaggtccactttgcttggatattagttttattgtcattttgccatttttttggtattcattatctactgtgatgggacaagaatttgggtgaaagtagtttacttgggaggtgatcccaggaggcatgatcagggagtgggcaagtaagactggcaaaagaggaacaccattaaaggatacattgagaagcgggttactgtcttgggcaagtgagctcaatcccagtggcatctctttgagaggctgcataaaacctttgagcaacctcatccatttagtccagcactgtactaatattatcactttctacgagcaataccacatgaaaaaatttggggagcattgctataaagaatggttgagagtgctgaagagaagccaggaaaataaaaagcagaataaataagaatggttgacatgcacggtggctcacacttgtaattccagcactttgggaggcggaggcgggaggatcacttgaggccaggagttaaagaccagcctgggcaacattgcgacaccccatctctacaaaaaaattttaaaattagctaggcatggtggcacatgctggtctcgaaaacctggcctcaaatgaccctcccgccttggcctcccaaagtgctgggattacaagggtgagccaccgtcctggcctggttacatttaactatgttgcagagaagatcgtggattcattcaaaatgaaatcattgttgctgggttcttgtaaaagtaaggttgttgagctatgggcattgagcatatgagaacagaaacataatccttttaatctactcagcattttgcaggcttcagaggaataatggctgttgtttctggctttgcagttcaagtgagatggatttagaagagctccaagcacattcctaaagtattaggtggttggaaggttctatgagttacgtagttgttacttcagtctccagcggaagggaggagacatgtcttcctagtcatattcctccttggtctcaaaaaaccacattttgttcccttcaagtcaggaatgtagccagaatgcccaccaggtggtgctccaattactttactgtataacattttgtgacctcctgtaggatataagaatattaaatgttagagttaaaggcagaaaatattctgtaacttgagcctcaagatgtaaagacttcatatattgagaagactaatatggcttttaaaatatcacatgacatcaaaatgtctatgcataaaaggtgaaaaaaaatgctatctcagagccaaggttaacattcttggtagaaaaatagattacaatcaatattttttaattgagytttaaaaagaattctgatgcactaggttctgaggcattacaaggatatatatgtatatatatatggcaatttccccccacatttacttatttatttttaattttattattattatactttaagttttagggtacatgtgcacaacgtgcaggtttgttacatatgtatacatgtgtcatgttggtgtgctgcacccattaactcgtcatttagcattaggtatatctcctaatgctatccctcccccctccccccaccccacaacagtccccagagtgtgatgttccccttgctgtgtccatgtgttctcattgttcaattcccacctatgagtgagaacatgcggtgtttggttttttgtccttgcgatagtttactgagaatgataatttccaatttcatccatgtccctacaaaggacatgaactcatcattttttatggctgcatagtattccatggtgtatatgtgccacattttcttaatccagtctatcattgttggacatttgggttggttccaagtcttcgctattgtgaatagtgctgcaataaacaaatgtgtgcatgtgtctttatagcagcatgatttacagtcctttgggtatatacccagtaatgggatggctgggtcaaatggtatttctagttctagatccctgaggaatcgccacactgacttccacaatggttgaactagtttacagtcccaccaacagtgtaaaagtgttcctatttctccacatcctctccagcacctgttgtctcctgactttttaatgatcgccattctaactggtgtgagatggtatctcattgtggttttgatttgcatttctctgatggccagtgatgatgagcattttttcatgtgttttttggctgcataaatgtcttcttttgagaagtgtctgttcatgtcctttgcccactttttgatgggattgtttttttcttgtaaatttgtttgagttcattgtagattctggatattagcccttggtcagatgagtagattgcaaaaattttctcccattctgtaggttgcctgttcactctgatggtagtttcttttgctgtgcagaagctctttagtttaattagatcccatttgtcaattttggcttttgttgccattgcttttggtgttttagacatgaggtccttgcccatgcctctgtcctgaatggtattgcctaggttttcttctagggtttttacggttttaggtctaacatgtaagtctttaatccatcttgaattaatttttgtataagatgtaaggaagggatccagtttcaactttctacatatggctagccagttttcccaccaccatttattaaacagggaatcctttccccattgcttgtttttgtgaggtttgtcaaagatcagatggttgtagatatgcggcattatttctgagggctctgttctgttccattggtctatatatctgttttggtaccagtaccatgctgttttggttactgtagccttgtagtatagtttgaagtcaggtagcatgatgcctccagctttgttcttttggcttaggattgacttggcgatgcgggctcttttttggttccatatgaactttaaagtagttttttccaattctgtgaagaaagtcattggtagcttgatggggatggcattgaatctataaattatcttgggcagtatggccattttcatgatattgattcttcctacccatgagcatggaatgttcttccatttctttgtatcctcttttatttcattgagcagtggtttgtagttctccttgaagaggtccttcatgtcccttgtaagttggattcctaggtaatttattctctttgaagcaattgtgaatgggagttcactgatgatttggctgtttgtctgttattggtgtataagaatgcttgtgatttttgtacattgattttgtatcctgagactttgctgaagttgcttatcagcttaaggagattttgggctgagacgatggggttttctagatatacaatcatgtcatctgcaaacaggaacgatttgacttcctcctttcctaattgaatgccctttatttccttctcctgcctgattgccccggccagaacttccaacactatgttgaataggagtggtgagagrgggcatccctgtcttgtgccwgttttcaaagggaatgcttccagtttttctccattcagtatgatattggctgtgggtttgtcatagatagctcttattattttgagatatgtcccatcaatacctaatttattgagagtttttagcatgaagcgttgttgaattttatcaaaggccttttctgcatctattgagataatcatgtggtttttgtctttggttctgtttatatgctggattacacttactgatttgtgtatgttgaaccagccttgcatcccagggatgaagcccacttgatcatggtggataagctttttgatgtgccgctggatttggtttgccagtattttattgaggatttttgcatcgatgttcatcagggatatcggtctaaaattctctttttttgttttgtctctgacaggctttggtatcaggatgatgctggcctcataaaatgagttagggaggattccctctttctctattcattggactagtttcagaaggaatggtaccagctcctctttgtacctcaggtagaattcggctgtgaatccatctggtcctggactttttttggttggtaagcgattgattattgcctcaatttcagagcctgttattggtctattcagagattcaacttcttcctggtttagtcgtgggagggtgtatgtgtcaaggaatgtatccatttcttctagattttctagtttatttgcgtagaggtgtttatagtattctctgatggtagtttgtatttctgtgggattggtggtgatatcccctttaccattttgtattccgtctatttgattcttcctcttttcttctttattagtcttgctcgtggtctatcaattttgttgatcttttcaaaaaaccagctcctggattcattgattttttgaagggttttttgtgtctctatttccttcagttctgccctgatcttagttatttcttgccttctgctggcttttgaatgtgtttgctcttgcttctctagttcttttaattgtgatgttagggtgtccattttagatctttcctgctttctcttgtgggcatttagtgctataaatttccttctacacactgctttgaatgtgtcccagagattctggtatgttgtgtctttgttctcattggtttcaaagaacatctttatttctgccttcattttgttatttacccagtagtcattcaggagcaggttgttcagtttccacgtagttgagcagatttgagtgagtttcttaatcctgagttctagtttgattgcactgkggtctgagagacagtttgttataatttctgttcttttacatttgctgaggagtgctttacttccaactatgtggtcgattttggaataggtgtggtgtggtgctgaaaggaacgtatattctattgatttggggtggagagttctgtagatgtctattaggtcagcttggtgcagagttgagttcaattcctgggtatccttgttaactttctgtctcgttgatctttctaatgttgacagtggggtgttaaagtctcccattattattgtgtggtagtgtaagtctttgtaggtcactaaggacttgctttatgaatctgggtgctcctgtattgggtgcatatatatttaggatagttagctcttcttattgaattgatccctttaccattatgtaatggccttctttgtctcttttgatctttgatggtttaaagtctgttttatcagagactaggattgcaacccctgcctttttttgttttccatttgcttggtagatattcctccatccctttattttgagcctatgtgtgtctctacacatgagatgggtttcctgaatacagcacactgatggttcttgactctttatccaatttgccagtctgtgtcttttaattgaggcatttagtccatttacattcaaagttaatattgttatgtgtgaatttgatcctgtcattatgatgttagctggctattttgctcgttagttgatgcagtttcttcctagcctygggggcctttacaatttggcatgtttttgcagtggctggtaccggttgttcctttccatgtttagtgcttccttcaggagctcttttagggcaggcctgatggtgacaaaatctctcagcatttgcttgtctgtgaagtattttatttctgcttcacttatgaagcttagtttggctggatatgaaattctgggttgaaaattcttttcttgaagaatgttaaatattggcccctactctcttctggcttgtggggtttctgcygagagatcagctgtttgtctgatgggcttccctttgtgggtaacccgacctttctctctggctgcccttaacattgtttccttcatttcaactttggtgaatctgacaattatgtgtcttggagttgctcttctcgaggagtatctttgtggcgttctctgtatttcctgaatctgaatgttggcctgccttgctagattggggaagttctcctggataatatcctgcagartattttccaacttggttccattctccccgtcactttcaggtgcactgatcagacgcagatttggtcttttcacatagtcccatatttcttggaggctttgttcatttctttttattctgttttctctaaacttctcttctcacttcatttcattcatttcatcttccatgactgatagcctatcttccagttgatcacatcggctactgaggcttctgcattcatcacatagttcttgtgccttggttttcagctccatcacatcctttaaggacttctctgcattggttattctagttatgcattcgtataattttttttcaaagttttgatcttctttgccattggttcaaacttcctcctgtagcttggagtagtttgatcatctgaagccttcttctctcagctcgtcaaagtcattctccatccagctttgtttcgttgctggtgaggagctgcattcctttggaggaggagaggcactctggtttttagagtttccagtttttctgctctgttttttccccatctttttggttttatctacctttggtctttgatcatggtgacatacagatgggtttttggtgtggatgtccttcccgtttgttagttttccttctaacagacaggtacctcagctgcaggtctgttggcgtttgctagaggtccactccagaccctgtttgcctgggtatcagcagcggtggctgcagaacagcggatattggtgaaccacaaatgctgctgcctgatcattcctttggaaattttgtctccgaggagtacccggccgtgtraggtgtcagtccgcccctactggggggtgcctcccagttaggctactcaggggtcagggacccacttgaggaggcagtctgcccrttctcagatctccagctgcatgctgggagaaccactactctcttcaaagctgtcagacagkgayatttatgtctgcagaggttactgctgtctttttgtttgtctgtgccctgcccccagaggtggagcctacagaggcaggcaggcctccttgagctgtggtgggctccacccagttcgagcttccctgccgctttgtttacctaatmaagtctcggcaatggcgggtgcccctcccccagcctccctgcggccttgcagtttgatctcagactgctgtgctagcaatgagcaagactccgtgggcataggaccctctgagccaggtgtgggacataatctcctggtgtaccgttttttaaacccattgggaaagcacagtatttgggtgggagtgacccgattttccaggtgctgtctgtcacccctttctttgactaggaaagggaattccctgaccctttgcgcttcccgggtgatgcgaagcctcgccctgctttggctcgtgcacggtgcgctgcacccactgtcctgcacccactcactgtctggcacaccccagtgagatgaacctgatacttcagttggaaatgcagaaatcacctatcttctgcatcactcacgctgggagctgtagactggagcttttcctattcagccgtcttggctcctccctctgtttatttattttgagacagagtcttcctctattgcccaggctggagtgcagtggtgtgatctcgggtcactgcaacctctgtctcccaggttcaagtgattcccctgcctcagcctcctgagtagctgggactacaggcacgtgcctcaacacctggctaatttttttttttttttgtatttctaggagagacggggtttcaccacgctagccaggatggtctcaatctcctgatctcgtgatccacctgccttggattataggcgtgagccactgcgcccagcccctcctcccacatttatacatgtgatgtctttcaatatcatctcagaatggataagatgtagatcaaaaattctgtcaaaaacagtgcaaaaaaatgcaagcagacgaaataccaattttcaaggtaagcaagcaagactagagttaaaagtagactatgtggttgggtgcattggctcaggcctgtaatcccagcaccttgggaggccaaggtgggtgaatcaaatgaggccaggagtgaaaccctgtctctactaaaaatacaaaacaaattagcgaggcgtggtggagcacacctgtaatcccagctactcaggaagctgaggcatgagaatcacttgaacccaggaggcagaggttgcagtgagccaagatcgtgccattgcactccagcctgggcaacagagtgagactctgtttcaaaaaaacaaacaaataaaagtagattatgttattactggacagttactactgaatgaatccaaatatttgctttcttcagccttacacttggactgccaggctgctagagaaacataacaggacaatttcgtgtcatctttaagtcaagactttaaacagaatttctggaaggaagcaacttaaatgcatttcctccactttcattgccagcctaacacagctgtcgtctcctgagccattgagttcttgggcctacagtggctggagagtgctggctctgttggagtcctcatgaaaaagtagaattggactttctcccagtgggccaactggaactccttcaatcccaccaaacgggtaacagaaacgtccatagcagtggtgttcataatagcaaaaatgcaaaactatctatacatcaattagtagcaaaatgaattaatcagttgtcatattttatacagtgaaatattgtatagcagtgacgaggaaggaactggagctccatgtttccacatggataaatctccaaaatatagaactgaacaaagaaagaaaataagcaagtagcagtagcatgctagaatattatataactaataaaaagttaaaaactgggccaggcrcagtggctcacacctgtaatcccagcactttgggaggccaaggtgggtggatcagctgaggttgggagttcaagaccagcctggccaacatagtgaaacccagtctctactaaaaacacaaaaattagctgggtgtggtggctcacgtctgtaatcccagctacttgggaggcggaggcatgagaattgtgtgaacccgggatgcagagggttgcagtgagctgagatcatgccactgtactccagcctgggcaacagagtgagactgtctcaaataaaataaaataaaccaaaaacaaaagttaaaaattataaaacaataccatttacatatatatatatatacatgcatacatatgtatgtatgtaaatacatatataatagtaaaaaagaaaaggtagtggttacttttagtaagggaaaagcatgggtggaaagacatatatargagcttcaattttaatggtaccatcttaatttgtaagctgaatggtagatgaagaaatgatcattaagatgtaatgatatatttgggaggccaaaacaggcagattgcttgtgctcagaagtttgagaccagcctgagcaacatggtgaaacccatctctaaaaaaagaaaatagaaaaaaattagctgggcgtggtggtgcatgcatgtatttggggggctcaggtgggagaatggcttgagcccaggaggtcgaggctgccatgaaccagggttgcgccactgcactccagcctgggtgaccaactgagaccctgcctcaaaaaaaaaaagatataatgatatatgaaatgtaagattttttttttgcgtgtctcaaataagtcaaagaagcatgggggagaataagaaaaaggagaggaggaagaggaagaggagaagaggaagaaggagaagaccaccttggaaggacaaagaataggaaccagcaggcctgtgagttccagtgggtgtgttgttttgggcaagaagttaccatcagagagactcagtacaagaagagggaatgctgagaggcattcctgaggtcagagagtgtgtttgctgggaaaatcagatgacatgggatgggaaggtatcctttcaaaaggggcaggtccatccattccttcaatgtatatttatgtgctctgcactgttctaggacacagcagtgaacaaatcagcccaaaatctgccctcatgagcttaggtgtctggcaggcaaattctgtatctagcctgtttgtgtgaacttcctarctaggcattcagggaaggacagagatttatttactctacaaatatatattgaacacttcatatatgtcaaataatgctggatgctggggagatggaatgagtccctgtcttcaaggaacttacaatgcagtgggaaaagccttatatgcagttacccatttaaagttaaatgtgttggaggcaagcagagtaccttgggaacacagcagaagccggggggtggtagggagtgttggagcctgcttctgcttggaaaatgagttgatttcagagaaccacgatgtgaattcagaatcagtgtcagttcattagcatagattaaagattctggccaggcgcggtggcttcatgcctgtaatcccagcaatttgggaggccaaggcgggtggatcacaaggtcaggagatcgagaccatcctggctaacatggtgaaaccccatctctactaaaaaaatacaacaaaaattagccaggtgtggtggcgggcacctgtagtcccagctactcaggaggctgaggcaggaggatggcgtgaacccgggaggtggagcttgcagtgagccgagatcgtgccactgcgctccagcctgggtgacagagcgagattctatctcagaaaaacaaacaaacaaacaacaacaaaacaaaacaaaacaaaaaaagattctgtgtttgagctgggcacggtagctcatgcctataatcccagcaatttgggagcctgagatgggcagatcacttcaagttgagagtttgagaccatcctggccaacatggtgaaaccctgtctctaccaaaaatacaaaaattagccgggtgtggtagtgggtgcctgtaatcccagctactcgggaggctgaggcaggagaatcacttgaacatgggaggtggagattgcagtgagccgagattgcacctctgcactacagcctgggtgatagagcgagactgtttaaaaaaaaaaattctacctttggagcatatacctaaaggtagccttatgctctrgggcactaggaagtctgttatccaaaaccatctctcttcccttccatgtgtcctcctaccaccagtctgttgctattagaaattcattccattgcctccattttattattttaaataacacactattctgttgaaaattattttataaatacaattcttataatcgaatttacaactttaatgttttgacaggagctatgtcccgaaatgtcttattgacaaaaacaccaaaatatctgtgacattctgagagacacaatataatacacaatcaggacacaatgtgttttttttttcttcttcatgttttccaaggcatgaagagtacagtagagaaaaaaggagttatggatgagggagtggcttcagccaggaagggatccatgaaagaggagggaaagcgtgtccagcagttggggaggtaaaagagagtatagtttttatgaacaaagctacagactagggagaaaaaaagatatagactaggagatcttccccatcaacattactctggaaatctgtggaacagttttttcctatgtgagaattatactgaaacaatgaagcaaataagaaaaaaagactatttgttcattcaaatattctgttatgcttattttatgacactgtgatagatactaggagtacagtctctgaagcacccattgaaggcagtagattgtgactgcttatagtgttcattctcctacccaaaggggtgaaattacggtctgtgaaaccctaaacccaattcattgagggagtagtactagaagtttggcttctaaaatcatgtttccgagtcctgtcttaaggaaggacttgagcttatgaaagttttatatgagggaaaccacacattagagctggaaaatcttacagcttactttactgcttttttctttttttaacttatggaaactgcattccctaagtctgagaggaaaaggaaatttctgcttcacacccttttcaattctcatatggagtagtttgcttttacattgtagggtaccagcttcaggaactactagagaagcttctgtcagcttttttcagagaaaccttgtgtggatccgtcaatgcagtgtccctgggagaatttccaggaactcatgactgctggaaccacctaccccaggcaggctccagtcaccctctgttttggagaactatatgactagattgtggcaagtttctctttgcatctagggatgttaggggaaggtggtgatggcggcgctacaggagaaacaatgawtatagtgaatgaaattagtctcattaaaaagtggtggaggttctactatgtgctagcactgtgccaggctccaaagcctggataataacacagagaccctgtgctcaagggaatcacagacaagtgggtgagacagattaatgtgtgataaatgcaaaaagcagccaaagtatggtactatggtagcatggggtagagaggaggcagggaagtccwgttgagtgaggctgtggctgagtcctaagggatagtccttaacaaggggaagatttgggggaggaatttccagactgaagacaccctataccatgaagtaagtttggggcctgtaagtagctcataataatgagaagggaagaggacaagagatgaggctgaagagagagacagaccagataacatgaggccccttgtttgccatgctaagaaatctggacaccctcaacagtccttagggatactgagggagcctgaggaaggcagtgagcactttcaaatagtttttgttttygtttttattttttctcctrtaaaattaaaaaattctcattgaagaaaatttggaggtgacagaaaggcataaagagaaaatatgtcacctttaatttctccacacagaaataaccactgccaattttggtatatttggtatatatctttttatatgtttgtggtcactttgtttatacaactttacatttgctttttcattaacgttctttcctgggcatttccatactttgtattcttttttttttaaataaacttttaattttgaaataattttagactaacagaagagttagaaagacaatgcagacagttcctgtaggtccttcccccagcttcccaggatgttaaccaagtactttctttcttgtttttttttgagatggagtctcactctgtcacccaggctggagtgcaacggcatggtcttggctcactgcaacctccgcctcccaggttcaagcgattctccggcctcagcctcctgagtagctgggattacaggcgtgtgctaccacgcctggctaatctttgtagttttagtagaaacggggtttcaccatattggtcggctggtctcgaactcctgacctcatgatctgcctgcctcggcctyccaaagtgctgggattacaggmgtgagccaccatacccagcatgtactatcttttttttwaaaaaaaattttcattgaggtaaaatatccatatataatttaccacctttaccatttttaggtgtatatttcagtgttattaaatacatttatattcttttttccctttatctctctcttcccccatccctcctggcctctgctaaccacagyctactctctatcttgatgagatccacttttttagctcctgcatatgagtgagaacatgaaatatttgtcttttgtctttctgtgcttgtgttatttcacttaacatcatggcctccagttccaaatacaaatgttgcagttgctgcaaatgacaagatttcattcctttctgtgactgaatagcattcaatatgtaccagttttcttttatctattcatccattgatgagtactttggttgattccattccccggctattgtgaatagtgatgcaataaacataggagtgcagatatctcttcsatatattcatttcctttcttttgtatatatacccagcagtggaattgctggatcacgttctgttttcaggttttagttttttgaggaaactccatactgttctccatagtgggtactagtttacattcccaccaacagtgtatgagggttcccgtttctccacatcctcagccgcatctaacaacaaactttctatctttcccatcacagtatcaaaatatatttacctctatcatattttcactgatactctaaaatgaccactaactaaactgaaaaactgaccccatagtactatgagttcatagacatgcccaacctgaaacccaactgtacttgaataagagcctcctggagtcacagtgcattaccctggaggagtgggaattctggacaaaagtagcatgctacacagagaggtgctcctgggcagatgggactttcaggaccccacagcttagcctgcatgtgggagcagctggtgtgtactaattccagatgaattctcactcactaagatattgataagtgatctgcaggcatttctccttatgtttattaaaaaaagccatacaactgagttttttgtgatcttgaccagttttaaccctaagtctgatccagcatttactgacattgcttaaagccagtactaaatgatttatgctcaattctaaagtcctgggttgaatcacttggtccttccagattgwccaaggaaaataccatgtgctggcaaaggtcaccgttaatgagggaaacaaattatccctgaggctcagtcctagcccctctgtgtgttccttttcaacatccaatgtgacctcgtctttctctaagtactcttagcacttayctgtcctcttttggggccattttcatcctctgtcatttgcatagttgtgtctgtgtatatttcttattattttgtatatttcttgagaatatcttctcccttcttatgtatttcacagtactgatcatagcaccttactatccgatgctaaacaaatatttgttcctttgaatttattaattctctatgctttttcttttagaggtgtcatggagtctcacagcttcagctaagatcttttagtacgtaaattctgttgggtatctccaactgcttcctaaatggttctacccagtaacytactttcattgctaattccaaaaagctaatactgaaacagtccctcccttagtctctccctgttatgagctgaattgtgtctccctgctccctccaccaaattcatatgttgaattcctaactcccagtacctcagaatgtgaccgtatttgaagatagggtctttaaagatgtaattaaggtaaacgtaaaatgaggtcttatggctgattgtctttatgcaaagaggatattaggactcagacacacacagttggaagaccatgtgaagacacaagagagaagacagccatctgtaagctaacgagagaggstgcaaaagaaaccaaacctacaaacactttgactttgaacttctggcctccagaaccataagaaaataaatttctgtggtttaaactacctagtctgtggtattttgttatggcagtcctactaaacgaatrtacttcctttacctgaattataagctgactttcccaatacacctccacatttctgtcatgtaccagcattctctcaggcataactatctgggagtctttttttctagtactctcactcttctcatcattaattgttttgctttttttaaaaaaattaccccttattggcacagctattactctagtcctcctcagttttgattcttatttcatagcctcaacacattttcctcaaatacagttttatatagatctcagtatctgatttctctgttataatatactcccacatgctttctgagtgccactcatatgaaatgatcaacaattcaaccatatctttgcccatattattgcctttgttgggagtggcctttcttctcttccccagggcttagtggtttgtggatctggacatgtaactacatgccttcttgttgacctcttatatcccctgtacttctgaacttggcatatgttcttgacttccctagtctcaacctccaaatctacctctctgctctgttcctactccagttacagtttaaaatattagattaacattgaatactccctgatttcaaagaggcacttctccatatagttataccacatatataggtggcagatactgaagattaatatagcgttaagttagagtttttggtttcgtgtcagattttttattaactcggtggctttgggaaagtgctaacactttttttcagcctcaactctaaagtaaagataaaaatatgtgatttcacttgagcattatgaagaaaaatagattaagtatgtgaaagatttgtaaggcatctacaaaacaatatttggtattatttgttgagtttggccttcttgatgcttcccatattgtcttttattgccaygaatcctgtcttcccaagtgcctgacaaactcgtttggggcctaaattataggtaatatattctttctgactcttaaagtacctagtcatcatttaatactgatttttttttaaaagctaactcctaaaatcacagtagttgaaaagccttttaagtagggtgattatttaattaactttgcatgacatggttctagctcacccttgtaatctcggcatcattattatagtatatttcttactctcaaaagtgtgcttatttggacaacagattatatggtcactctccccataagtatcctggcttaaacagaaccacagaagtttgtttcatgaagataaaaagaacatagagcaaacttttttctgtgggaaagaagaacatgaaagagagagrgttgagtctctacttgggagaatatttcatctagcagagattgtaaagtctgtgggtaaaatttattgtacttaaatgtttgcatgtcagataagacaaaccagctgcacttcactacaattgccaagtttggtctttgcatttaacttttggcagatgtgcttgtacgctattcaggtcaaaaagctattaatcaaactgttaaaatgtgttgttaaaagttgaagatgtagtctatgttctgatcttaaacagtttttatttgtttttattactcaagtaatacatagttactcaatacatactcaacatacatacttttattgtctagttaaaattatatcaaaatatatagactgaaaaatgtctctctccatcatcactcacccctcatttacctaatctcacttttccatatgtaaaccaattttaaccagaaacaacgcaaaataaatattgagtatgaatgaattgtaaatatcaagacgttccataaaagtaacaaattactaacttttaataaatagtccaacttttctggaagaaaatttgtcaaaatacatcagtgttaaacatgcagttttagactcagcaatttcaattcaaagaaataattggacaagcatacaaggatatacatgtaaagatattcattgcaacccaggagctgaattttgcaaagattaacaaaaaatatagaccactagccagactaataaagaagagagaagaatcaaatagatacaataaaaaatgataaaggggatatcaccactgaccccacagaaatacaaactaccatcagagaatactataaacacctctatgcaaataaactagaaaatctagaagaaatcgataatttcctggacacatacaccctcccaagactaaatcaggaagaagtcgaatccctgaatagaccaataacaaattctgaaattgaggcagcaactaatagcctaccaatgaagaaaaaagtccaggactggacggattcacagctgaattctaccagagatataaagacagctggtaccattccttctgaaactattccaaacaacaaaaaaagagggactcctccctaactcattttatgaggccagcatcatcctggttccaaaacctggcagacacaacaaaaaaagagaatttcaggccagtattccagatgaacactgatgcgaaaatcctcaataaaatactggcaaaccaaacccagcagcacatcaaaaagcttatccaccactatcaagttggcttcatccctgtgatgcaaggctggttcaacatatgcaaatcaataaacgtaatccatcacagaaacagaacgaatgacaaaaaccacatcattatctcgatagatgcagaagaggccttcgataaaattcaacaacgctttttcctaaaaactcgcaataaactaggtattgatggagcatatctcaaaataataagagctatatatgacaaaaccatagacaatatcagactgtaagggcaaaagctttgaaaactgtcacaagaacaggatgccctctctcaccactcatattcaacatagtattggaatttctggccagagcaatcaggcaagagaaagaaataaaggtattcaaataggaagaggaagtcaaattgtctctgtttgcagatgacatgattgtatatttagaaaaccccatcgtctcagcccaaaaactccttaagctgataaagagctttggcaaagtcttgggatacaaaatcaatgtgcaaaaatcacaagcattcctatacacaaataatagacaaacaaagagccaaatcatgagtgaactcccattcacaattgctataaagaaaataaaatacctaggaatacaagttaccagggacatgaaggacgtcttcaaggaaaactagaaaccactgctcaaggaaataagacaggacacgaacaaaaggaaaaacattccatgctcatggataggaagaatcaatattgtgaaaatggccatacttcccaaagtaatttatagattcaatgctatccccatcaagctaccaatgactttcttcgcagaactagaaaaaactactttacatttcatataaaaccaaaaaagagcccgtatagccaagacaatgctaagcaaaaagaacaaagctggaggcatcatgctacctgacttcaaactatactacaaggctacagtaaccaaaacagcatagtactggtaccaaaacagatatatagacaaatggaacagaacagaggccccagaagtaacaccacacatctacaaccgtctcatcttcaacaatcctgacaaaaataaacaatggggaaaagattccctatttaataaatggtgctgggaaaattggctagccatatacggaaaacagaaactggatccatgccttacaccttatacaaaaattaactcaaggtggattaaagacttaaacataaaacctaaaagtataaaaaccctagaagaaaacctaggcaataccattcaggacataggcatgggtaaagacttcatgactaaaacacccaaagcaatggcaacaaaagycgaaattgaaaaatgggatctaaataaactaataagcttctgctcagcaaaagaaactatcatyagagtgaacaggcaacctacagaatgggagaaaagttttgcaatctatgcatttgacaaagatctaatatccagagtctacaaggtacttaaacaaatttacaagagaaaaacaaccccatcaaaaagtgggcaaaggatgatgtgaacagacacttctcaaaagaagacatttatgtggccaacaaacatatggaaaaaagctcatcatcactggccattagagaaatgcaaatgaaaaccacaatgagatgccatctcctgcctgttagaatggtaatcgttaaaatgtctggaaacaacagatgctggtgaggatgtggagaaataggaatgcttttacggtgttggtaggagtgtaaattagttcarccattgtggaagacagtgtggcgattcctgaaggatctagaactagaaataccatttgacccagcaatcccattactgggtacatacccaaaggattgtaaatcattctaccrtaaagacacatgcacacgtatgtttattgtagcactatttacaataagcaaagacttgtaaccaacccaaatgcccatcaatgacagagtggataaagaaaatgtggcacatatacactatggaatactatgcagccctagaaaagaatgagttcatgtcctttgcagggacatggatgaagctggaaacaatcaccctcaaaaaactaacacaggaacagaaaaccaaacactgcatgttctcaatcataagtgggagttgaaccatgagaacacatggacacagggaggggaccatcacacactggagcctgtcagggggtgggggcaagaggagggagagcattaagacaaatacctgatgcatgtggagcttaaaacttatgtgacgggttgataggtgcaggaaaacaccatggcacctgtatacctatgtaacaaagctgcatgttcagcacatgtatcccagaacttaaagtaaaatgaaaaaaaaaaaaagatattccaagattcttccaagatggctaaataggaacagatctggtctgcagctcccagcaagattgacacagaagacgggtgatttctgcatttccaactgaagtacgtggttcatctcattgggactggttggatggtgggtgcagcccacggagggtgagctgaagcagggcagggtgtcgcctcacccaggaagcacaagaggccagggatttcccgttcctagtcaagggaagctgtgacagtctatacctggagaattggtacactcctgctcaaatactgtgcttttcccatggtcttcacaactggcagaccaggaaattcccttccatgcctggctcgccaggtcccactcccacggagccttgttcactgttagcgcagcagtctgtgatcaacctgcgacactgcagcttggcgtggggagggggtgtctgccattgctgaggcttgaataggcggtttggtgctcacagcgtaaacaaagagcctgggaagcttgaactgggtggagcccactgcagctcagcaaggcctactgcctctctagattccacctctgtgggcagggcatatcagaacaaaaggcagcagacagcttccgaagacctaaacattccggtctgacagctctgaagagagcagtagttctcccggcacagcgttcaagctttgagaatggacagactgcctcctcaagtgggtccctgacccccgtgtagcctgactgggagatacctcccaataggggcaacagacacctcatagagacagggggcccctctgggacaaagcttccagaggaaggatcaggcagcaatatttactgttctgcagcctctgctagtgacacccaggcaaataaggtctggagtggacctccagaaaactccaacagacctgcagctgaggggcctgactgttagaatgaaaactaacaaacagaaagaaatagcatcaacatcaacaaaaagcacatccacaccaaaaccccatctgtaggttaccaacgtcaaagaccaaaggtagataaaacaacaaagatggggagaaaccagagcagaaaagctgaaaattccaaaaamcagcacacctcttctcctccaaaggatcacagctcctcgccagcaagggaacaaaactggatggagaacgagtttgatgagttgacagaagtaggcttcagaargtcrgtaataacaaacttctctgagctaaaggagcatgttctaacccatytcaaggaagctaaaaacctcgaaaaaaggttagatgagtggctaactagaataaacagtttagagaaggccttaaatgacttgatggagctgaaaaccacagcacgagaactttgtgacgcatgcrcaagcttcaatagctgatttgaccaagtggaagaaaggatatcagtgatcgaagatcaaattaatgaaataaagcaagaagagaagattagagaaaaaagagtgaagagaaaagaacaaagcctccaagaaatatggggctatgtgaaaagaacaaatctacatctgattggtgttcctgaaagtgacggggagaatggatccaagtaagaaaacattcttcaggatatcatgcaggagaacttccccaacctagcaaggcaggccaacattcaaattcaggaaatacagggaacaccacaaagatactcctcgagaagagcaaccccaagacacataattgtcagattcaccaaggttgaaatgaaggaaaaaatgttaagggcagccagagagaaaggtcgggttacccacaaagggaagcccatcagacaaacagctgatctctcggcagaaaccccacaagccagaagagagtaggggccaacattcaacattcttaaataaaataattttcaacccagaatttcatatccagccaaactaagcttcataagtgaaggagaaataaaatcctttacagaccagcaaatgctgagagattttgtcaccaccaggcctgccttataagagctcctgaaggaagcactgaacatggaaaggaacaaatggtaccacccactacaaaaacatgccaaattgtaaagaccatcaatgctatgaagaaactgcatcaattaacgggcaaaataacctgctaacatcttaatgacaggaccaaattcacacataacaatattaaccttaaatgtaaatgggctaaatgtcccagttaaaagacacagactggcaaactaaattgtcaagacccatcggtgtgctgtattcaggagacccgtctcacatgcaaacacacacataggctccaaataaagggatggaggaagatctaccaagcaaatagaaagaaaaaaaaaaaaaaagcaggggttgcaatcttagtctctgataaaacagacttctattaaatccactgcagtctctgataaaacagacttagtctctgataaaaccaacaaagatcaaaagagacaaagaaggccattacataatggtaaagggatcaattcaacaagaagagctaactatcctaaatatatatgcacccaatacagggacacccagattcatcaagcaagtccttagagacctacaaagagacttagactcgcacacaataatcatggtagactttaacaccccactgtcaatattagacagatcaatgagacagaaggttagcaaggatatccaggacttgaactcacctctggaccaagtggacctaatagacatctgtagaactctccaacccaaatcaacagaatatacattcttctcagcaccacgtcgcacttattctaaaattgaccacgtaattggaagtaaagcactcctcagcaaatgtaaaagaacagaaatcacaacagtctctcagaccacagtgcaatcaaattacaactcaggattaagaaactcatccaaaaccacacaactacatggaaactgaacaaccagctcctgaatgactgctgggtaaataacaaaacgaaggcagaaataaagatgttctttgaaaccaatgcgaacaaagacacaacataccagaatctctgggacacatttaaagcagtgtgtagaggaaatttataacactaaatgcccacaagagaaagcaggaaagatctaaaatggacaccctaacatcataattaaaagaactagagaagcaagagcagacaaatttaaaaggtagcagaaggcaagaaataactaagatcagagcagaactgaaggagatagagacacaaaaaaacccttcaaaaaatcaatgaatccaggagctggtttttgaaaagatcaacaaatagatagaccactaccaagactaataaaggagataagagagaagaatcaagtagacacaataaaaaatgataaaggggttatcaccaccaatcccacagaaatataaactaccatcagagaatactataaacacctccatgtaaataaactagaaaatctagaagaaatggatgaattcctggacccatacaccctcccaagactaaaccaggaagaagttgaatctttgaatagaccaacagcttctgaaattgaagcaataattaatagcctaccaaccaaaaaaagtctaagaccagatggattcacagccgaattctaccagaggtacaaagaggagctgctaccattccttctgaaactattccaaacaatagaaaaagagggaatcctccctaactcatttcatgaggccagcatcatcctgataccaaagcctcacagagacacacaaaaaaagagaatttcaggccaatatccctgatgaacatcgatgcgaaaatcctcaataaaatagtggcaaaccgaatccagcagcacatcaaaaagcttattcaccacgatcaagttggcttcatccctgggatgcaaggctggttcaacatatgcaaatcaataaacataatccatcacataaacagaaccaacgacaaaaaccacacgattatctcaatagatgcagaaaaggccttcgataaaattcaacagcccttcatcctaaaaactcgcaataaactaggtattgatgggacgtatctcaaaataataagagctatttatgacaaaaccatagccaatatcatactgaataggcaaaaactggaagcattccctttgaaaaccagcacaagacaaggatgccctctcttaccacttgtattctgcatagggttggaagttctggccagggcaataggcaagagaaagaaataaagggtattcaaataggaaaagaggaagtcaaattgtccctgtttgcagatgacatgattgtatatttagaaaaccccatcgtctcggccccaaatctccttaagctgataagcaactttagcaaagtctcaggatacaaaatcaatgtgcaaaaatcacaagcattcctatacaccaataacagacaaacggacagctaaatcatgagtgaactcccattcacaactactacaaagagaataaaatatcttggaatacaacttacaagggatgtgaaggacctcttcaaggacaactacaaaccactgctcaatgaaataaaagaggacacaaacaaatggaagaacattccatgctcatggataggaagaatcaatatcatgaaaatrgccatactgcccaaggtaatttatagattcaatgccatccccatcaagctaccaatgactttcttcacagaattggaaaatattactttaaagttcatttggaatcaaaaaagagcccacatagccaagacaatcccaagccaaaagaacaaagttggaggcatcatgctacctgacttcgaactaaactagaaggctacagtaaccaaaacagcatggtactggtacaaaaacagatatatagaacagaatagaggcctccgaaataacaccacacatctacagccatctgatctttaacaaacctgacaaaaacaagcaatggggaaagggttccctatttaataaatggtgctgggaaaactggctagttatatgtagaaagctgaaactggatcccttccttacaccttatagaaaaattaactcacagtggattaaagacttaaatgttagacctaaaaccgtaaaaaccctagaagaaaacctaggcaataccattcaggacataggcatgggtaaagacttcatgatgaaaacaccaaaagcaatggcaacaaaagccaaaattgacaaatgggatctaattaaactaaagagcttctgcacagcaaaagaaactatcatcagagtgaacaggcaacctacagaatgggagaaaatttttgcaatctacccatccgacaaagggctaatatccagaatctacaaagaacttaaacaaatttacaagaaaaaaacaaccccatcaaaacgtgggcaaaggatatgaacagacacttctcaaaagaagatatttatgcaggcaacagacatatgaagaaatactcatcgtcactgctcattagagaaatgcaaatcaaaaccacagtgagataccatctcacgcctgttagaatggcaatcatgaaaaagtcaggaaacaatagatgctgtagaggatgtggagaaataggaatgcttttacactgttggtgggagtgtaaattagttcaaccattgtggaagacagtgtggcaattcctcaaggatctagaactagaaatacgatttgacccagcsatcccattactgggtatatacccaaaggattataaatcattctaatataaagacacattcacatgtatatttattgtggcactattcacaatagcaaagacttggaactaacccacatgtccatcaatgatagactggattaagaaaatgtggcacatatacaccatggaatactatgcagccataaaaagggatgagttcatgtcctttgcagcgacatgggtgaagctggaaaccatcattctcagcaaactatcaaaaggacagaaaacctaacactgcatgttcccagtcataggtgggaattggacaatgagaacaaatggacacagggtggggaatgtcacacactggggcctgttggggggtgggggtctgggggagggatatgtaaatgacaagctgatgggtgcagcaaaccaacatggcacatgtatacctatttaacaaacctgcatgttgtgcacatgcaccctacaacttaaaagtataatttaaaaaaaagaaaaaaggtattccttgcaatgtagtttgtgataatgaaaatctagacatagtttaatgtcttataattagaaattagttaaatatattatggtatagtcatgcaatggaatactatggaactataaaaaatgatgatgtagtgctgtatttattgatattgcaggaggtccacaatatgtcatgaaatgaacaaaagtagattccaaacactttatataggccaggcgtggtggctcatgcctgtattctcagcactttgggaggcgtaggtgggtggatcacatgaggccaggagtttgagaccagcctggccaacatggtgaaaccccatctctactaaaaatacaaaaaattagccgggtgtgatggtacacacctgtaatcccagctactcagaaggttaaggcaggagaatcgcttgaacccaggaggtggaggttgcagtgagccgagatcgtgctactgcactccagcctgggcaacagagcgagactccgtctgcaaaaaaataagaaaacccaaaaccaaaccaaaacagaacaaaagcagtatatatagtatgattacaagtgcatgtatatatttatacataaatttatgtataagtatgtgtatatatgtatttaaataagtatatgtataaatatatacatatataacatatgtgtatgtatatttatttaagcacatatataaatgtatacatacacatataaatatactttaagcatttatgtatattgattgaaaaaagtacatggagaaaaatacaaaagtgttcatggtagttatttttaagtgatataatattgccattttttactcattttatgactttttttttttttgagacacagtctcactctgtcacccagtctggagtgcagtggcacgatctcagctcattgcaacctccacctcccggatttcaagcagttctcctgcctcagcctccccagtagctgggactacaggcgtgctgccatgcctaactaatttttgtatttttagcagagaaggggtttcatcatgttggccaggcttgtctccaacttctgacttcagcatcccaaaatgctggaattacaggcgttagccaccacgcccagctgtactttgtaacatttttgataccaactttatttttcataataaggatatgttacttctagaatcagaagaagaaacctctttgttttaaaaaacttcacccaaaaagtcatccattcaagagttgtttttctccaccccagctgaygtgacaaaatgctgccaacaattttgatgccaataatgacttctacatattaaatacttctacatactgacaaaaaattatctcttaacagcatgaattgaattttataaaaaaaaaaattygattgggaatatctgctccagtacttagaggtttaactagtagcaaaccactggtttattttggagtgaatcaatctacattgattctatggaaagagtcctaaatctctctcctgtcaaaggaaatatttggcatgaaaaaaggcagcttgtatatttgcttgacagcatgttgtggtttaatgaattagaaccataatttttagctttgttcttaaaaacagactgattttagagaaatagaaataaaatgtatggaggtgatagaaaatacaaatttcccaggtactaaaggagggcctgttttactccttgttttaaatccctcctgagtgccaaatcttaactaccaattgcctgatgcttatctccacatgaacagctacacaggcaccttaactcatttacaaaattgaatgtgtcatctycttcctacaaatcttccatttcttcctcagttctacaacatatatctaagagcaaaaaccatccttcccaacacccggattaaaataacctctaagtctggatgaaaagaatggaggratgggaataggatagaagggatgaggggggaatggcatttttgtgacttttataaccatagtcacaaccattttgtgacatttataaccatatcaatgtttcatacattcaataaataaaaccaacaggatgggtggggagaggggacctgaaatggaatactaactataacaaatgaacctaaccatattacgaatgaataacaaccgcactgaagggtgtggagaagaaaaagaacaaatctcaataactctggaaaataatattttcactacatgctgtatggctaaaagacaaaaagctgtgcacaaatagaaatgcacatgactaaaactgtatacaaagaattatatacaaatattgtactttagctagtaagtttatttttcacaggggtatgaaatggcaattctgcatctactttatatatatatattataggattgagcaaactaatttagattttaaaagacaaagaaggtctgtaaataattcccgagagccagggatctcactgttggagaaaaaaagtcaaaaatgaataaataaaaggaaagggagaagggtagaatgaatcttgtgatatataagctattaatttgaactacaaattaaactgtaaattgtatgtatatatagagagggtggtagggtggtgtgatgatggtggtggtagcggggtttggtggtggtggtagtgggtggtggtggtggtagggtggtggtaggggagcagtagtggtggtggtgtgtgcgtgtctgtgcatacttaggatatgtttcctaaatctgtatgcagagagggcctggaatcaacactactgtaccaacgagcatgcctagcaaccaggtcttatttctaaatatcattctctcattaaaaagaaccagggctctttggaaagtgcttgataccagggcaggggaaagaaatgtaaaagatgggtctgtaacattgtgtggtgttgagaagtaagaaggtgctcaaaaacagatggggacatgttgacaggatacaggagccacctgagggaactcccagtagtaaaattgggcataatttaaacaaaataatacataaggagagtaatggaccatactctatagaataaaataagtttccatgagttcactgatacaaacaattgaataaataataaataaataagtggtggaagaggggaacatgctctcttttttttaacagtagaattctaattcacaaatakagaagaagtgacggaaatagaaaaatatcgagtgcagtggctcacgcctgtaatcccagcactttgggaggttgaggcgggtggatcacttgaggtcaggagtttgagaccagcctggctaacatggcgaaaccctgcctccactaaaaatacaaaaattagccgggcatggtggcgggtgcctgtaatcccagctactcgggaggctgaggcaggagaatcgcttgaacctgggaggtgaaggttgcagtgagccgagatcaagattgtgttactgcacttcagcctgggtgacagagcaagactctgtctaaaaaaaaggaaatagaaaaatatcatttggcaaacatcacattaataattgtttcaatcaagaatcactaatggctactaacatcatgctaacacatgatgagaaacaggatatttacatagccttgaatatgtcccctcaagatagtcacagattataaacggaaaaatagaaacttttcagtggagaaacctagcagatagcatcttaaccaaatgacagaagttatcattaccagtagtgagatgttccagcaccatatgtctcctaatacatgtactgagaaaggcacaacatcttctcttgggaggacataattctgccaaaaatgcacagtctgaatttaatcatgaggaaacataggcagtctacagaatgactgactagtaatcttcaaaaatagcagggacatgaaagacaaagcaaggctcaagaactatcccagacaaaggagactgagaaaccatgacgactaaatgcaacgcgggatcatggatcagaaaaaaagacatcagtgggacaatgtctttggggatagctgaaggtcgataggtaatttttgrtgttacttctcactttttatacacctgaaattattctgaagtgaagagtaataaaaactttagacatttggtctggtgccgtggctcatgcctgtagtcccagcactttgggaagccgaggtgggcagatcaagaggtcaggagttcgagaccagcagggccaatgtggcgaaaccccgtctctactaaagatacaaaaaattaaccgggcatggtggcgggcacctgtagtcccagctactcgggaggctcaggcaggagaattgcttgaacccgggaggtggaggttgcagtgagccaagattgcgccattgcactccatcctggaccacagggtgagactctgtctcaaaacaaaacaaaacaacaacaaaaaataaactttagaaattagttttttaaaaaaaacatcaattcrcagactggtacactgtgctgagggaatgacgagaacaaagagatgaggagtggaagcttgggaaggctgggcacaggtggggccttcgggggatggccctgggaagcagggctcggggcagaaatgaagggggttgcatgtcacaatggagagcaaaattttaacagctacaaaattggaccctcatataaagtggtggattccccttcattcccctctccctccatattatgaggaggattttcttcctttaaataataaaaattactatcttactaatttattttcatttgtgtaatatgacaaacccaaaagaatgtgctgctacataatttaaaataacataaagaaaatgcattttagaatgaagcagttataggagaaaaccaaacctaaaacaaacacaatctgaatcattttgattctgcattctcctctctgccggccttgcttttcctgcctcccccaccctattctcccttattccatctgtcaccaagccctgccaattataacttcacactatttcttacactaggattcaaatctaaaggcctcaggtttcatctttcctctgtacttactagccctactactgtggacgattctctctgtgcctgaatttctctctctctttctctctgtttctctctctctttttctgtgtgtgtgtgtgtgtttgaggggaaggtaggagtccagtaagataatgcacatgccctttataaacaataatctattatgaaatgctaaggtttatttggggctttaatgtgtattatctcgatgagtggtttccaaattttatgattttatgaaactaaaaagtttgattaactgatagaattttcaacttgataaaataaaaaaaatctccttactataccatttcatatgaataaaagaaaggacattttaacaaaaaaaggacatattctcagaaaaaaggtctttcccaaccttgcattgtgttacatttctatacccatggttctttctttttctccttttaagcagactgaccctatgccatcaatggttctagggtcagcatttaggaattgtcctggactaaaatgtccgaagtgataacttcctgagctccttgtatccaatcttgccttcttttccagtccaccctatgctcggcatccaacaattttttgttaaatgaatcaatggacagatactcattttgaaaccaatgaagaattgagcctgattattttggagttaattaaagtgaggagatataggagacagatgagccagcatattcatacttggatatagagaggagagctgagaatctatttaccacttcttttctcttacattttctgatttactgttcagtgattttacctaagttgagggtgtgtctttaaagtagcagaaccttgctggaataataaatacataaatggaagtgctcctcaggggcagaggggtttaatttattctgcaggcagtggaggtggtggtttagcatatgagtctctttcttttgccaagcaccacttggcaaatccacagaaggattgacgttctttgtctgctaaaacctggggagagagaaatggagcagacaccctcccatgggaccccccaacttttcatcgctgtgtttactctatacatctatatgaaattatttactgaaggctaagggtaatttcaaaaataacttacaatatgggagggacaagtgttgaagtttaagccctcttggactttccctgcatcagaagccaaggcctgcagatgcattgtccattttggacttggcttttcagcccttatagttgcatctgcaccttatactccctctgtcctcacaagcacctggggcttcaagtatcttagtccaggaactttagcccctcttgagaaccttcagctcctctgcatgagagcagatctagaatagaataaacaccctgggcttcagctctgagtgggcaaggatacttgctgttcattgctgtcctgtctcgtgtgcctgtatgagctcgtgtgtgtgtatgtkcgtgtgtgtgtgcacgcatgtgtacatgttgagggatctgaaaatcgggtagtggatgggctccagacccttgagtatggtttactgtgtgccttctagtttgaactcaatcttcccataggtaagaatgatgaggctgttggcttctttattagttgactcaaatgaccacatttttcaaagttagacattaatttttctttaataaatcatagtttaaacttgggttgctattttctctactagcgtagttctggtttggcctttagaaacaacagtccccggccgggtgcagtggctcacacctgtaatcccagcactttgggaggccgaggcaggcggatcaagaagtacctttatttctttattaaagyatcttgattcaaaaggtttccctcttaccaaaaagggatagggaaagttgccagttaaattttccatcctaatagtaatgttgctgtgagagaaggagattttggagaaataggtaactgatttcaaacacatgatgctttagggctatttatttatttttgcttaaaggtctttgttgtaaaaacagaagtaagatctgacggtcctaagaacaggatgccactgcttccatacctagtgtggataggaccttttttcttcttttattatccttcctacctgttgaaagactgttgtcagtcagagctgaaacccagrttggccctgagctcaaatcatagtcaagtatggtagtcttaagaatgggagagtcagctgggtgtggtgggttatgcctgttatcccaggactttgggaggtcacggcgggtagatcacctgaggtcgggagtttgagaccagcgtgaccaacatggagaaaccccatctctattaaaaatacaaaattagctgggcgtggtggcccatgcctgtaatcccagctactcggtaggctgcggcaggagaattgcttgaacccaggaggcggaggttgcggtgagccaagatcacaccattgcactccagcctgggcagcaagagcaaaattccatctcaaaaacaaacaaacaaacaaaagaataggagagtctgggtgcagtggctcacgcctgtaatctcagcactttgggaggccaaggcaggcggatcacttgaggtcaggagtttgagaccagcctggccaacatggtgaaaccccatctctaccaaaaatacacacgcacacaaaaaacgaattagcaaggcatggtggtgcatgcctgtaatgctagctacttggtggctggtggctgagcgtgagaatcacttgaagctgggaggttgaggttgcagtaagccaagattgttctactgcactctagcctgggcgacagggcaagactctgtctcaataacaacaacagaaaaagaatgggagaaatatacctaacaataaacctgcagattattaattctatgagtgttgaagtcaagaatgagttcagactgaatgtgatgtaactctggttctgcttttctttgctttctccatggcacttattcaggataggcacttcagaagacattcctatttactggctgggaggccaaaagctaagacagaactttcagtctcactcttaggggtcacaaaattattgctttccaatttaaactgtttcacttccaaatttgagcccccaaatatgaaatactgcctcacctgtgccttttatgctgaaaatataaaatattttaggaaaagaaacacattttaaatattaatatctgctaagtaattttgttattaatttagtttttgagcagagttacatttgaaaaaatatataaaagtttgaatatggatagagagatagatagagtcattccaggttatttaactgttgactctttaagtgctgcatttaagtacatacttgaatcattggaaggcatttttgacttttcagtgttttccccagcacttttccatgggtttaactgagtgctgggttgttgagtcttaaattgtacattaaaaattaggtgtccaacaaatataagaaaattatgtggttatccacttatggttaagaaataaatatataaaatgtcatcactaagacattttatgtatttagcctctagcctctcaaaggcataactactaaagcatatttttctgccttaatattttgtaactccattagggttaatggatgttctaaacaaccttaagctatttggaagagtgccttatataacaatgttgtttatcttccacagaataaacactcgaaaggcctagtacttctctccctaagccagtgcattctggaaagaactcagtcataagagtccattattcaaataaaatgactgttgaagcagaaagtaataactgattttttaaagaagatcgttttctaagatttctaaaattgtcaaaaaccattttaagttactgcaggtgcatttattctatgagttgygttataaatcaaaagatttcctattaacctattttaggaatagacttgtaattctcaaacttgagtaatgtaatgtaaaaaagcccttaaaaggaagaaaatatttagattattagaatacccagagttgatgtatatgatttttatgtcattgttattgctatgtctttctatgtttatagctaatatgtccacgtaaaagctaagtttgtatatatttatagctaagatatccacataaaagccaaatacatttacatattaaatacaagccaaatgataaaaactaatataattaaaattgacaacattaatttgctagatgatgctttgctgaaattgaagagcatatgttgaggttaatgataggaagatttagtcacttacttttttacatgattttttttttagtgcaatagattatcatgtgaatcactgtcatcatatttatttatattttaaaaatgattttgtttttatccactacaatttattggtgggccaatttaattgttcactccaaaatgcaagagagaaaatctgactggaaaatccttcattgtatatttattttaatagatactacttgcatactgttgtaatttggcacatacagagacagaatcagaacaatacttccacttgtgataccagtaaagcactggctggataaccagggcagcctcacttatgtctttttcaattaattaattaattaattactttttttgagatgaattctccctctgttgcccaggctggagtgcagtggcaccatctcggctcactgcaaactctgcctccctggttcaaatgattctcctgcctcagcctcccaagtagctgtgattacaggcacccgccaccatgcccagctagttttgtttgtttgtttctgtttttgtatttttagtaaagatggggtttcaccatggtggccaggctggtctcgaactcgtgacctcaagtggtctgcctgcctaggcctcccaaagtgctgggattacaagcctgagcctttgcaccccgcccacttctgtctttataattgttgggggaaaaacatccaaattgaaagcaataatgatgcaggatgatggttgatatttttactttataacccacaatctttgatcagctagctatctatgcttaccagtacattttaaggcaagctgtgtcatttcagatgctcatatgtgtcaccaatcccattggggtcacatgagaggctggcatatggyacaatttgaaaataacacagtcatccagacaacccaggatatgctttttatgaaacttataaaaatggatggaaaaaaatggaaaaaataaaaaggaaattataataaaatgaagggaccccagagaatcaattggttgcagaaatcctgggttaaatcatacaaatgaaattgctttgaaaactgtagcatgctttacaagtgccaatactgtattattatgaaacaaatataattggaaagatctggacttactagacaataaaaaagattggattaactctacatgcagacagaaaattcccacagtgaaggtcattaatcagagtttgtagaaaaacagctgctcctgccattccaytggagaaagcacaaaacaacataattgcttcataactgtactctggggaagactgaccttggttctaagagttgcttgtgtggcctggttctgtgtgtgggttaggtgaggaggaggaggtgttgagtggggaggggaaaggaccccttccctctgaaagaaactgaagcatttgatctggggctgttccctggggcattgtggggcagagacccctggaaagaaagcagtaggtgagatgcctaggtgagaagtagaagtagatgagaagtctagggtggagtcccaagtacatactcgactactcctagggcactgaccctaaaataattaacctcgtaggaaaaaatcatgttccctatagaaacataaagtttttactacttggcccctaagtgatagattatatgttgttgctcaaagagaagaaaatgcagatgaagtaattccacatgcatcaggaaagtccctttcctctctgtactcaagatagctctcaacattgatcttcaagtattgattagtcagagaaaggaagatttattattattctctaatttccactttctgaaatgttaatattgttttcttactgagaatgtgaacttttggatgtgattatcagctaatccagttggaattcaatcttggcattataacaggatcatatttacaacctacttcagtttccaaaaatcagccaactgagagaaaatattgtgatcaggaatttcaatgggaaagccaaaatctagagtgaaaacacatcttctgtgaaggattacatcataaagtgtatgcgagcctatctggaattagggataagtacagagaagttcagttcagttcagccgacagctttggagtgtctggtctatgtcagggactatggtagaggcaggggtgcagaaatgggcaagatagtctgcttggtctcaaggagctcatgatcaaataatcagtctcatgttaaaaactgaaatattcagaatcgtttcagctcaaacagagagcaactgatgttgccaggatcgagatggattcatgtgaaataactacgtcattttagaacagaacattgaaaagtgccatcaattatagagcataaagtgaaattgtaattgaaagtagtttctttgttacttagattcttttattaggctcctttgttcaaatcaattctttcttttaaacacaaataagatgattctgggtagatggatcttcaagtagattttagtccagcttaaatttaaatagggaaagaacaatcagggatattctactaaattgttaggcaccgaattgtgttatgttcttactaaaaataggtatttcttataatcttcagatgctctaagctggcatgaataactagtactgtaataaaataagttctgccaaaaagttaatctgacacacagcaatgaaatgcctaaagctgtgtgtcatagagtcattatccataaatgataaatgatgctcataaataccagtattgaaaattatttccccatggctaaaccaaggtcagatttttttcttgcactcttttttagtcctctatatccatagatagcacccaagagtgaacagttttgctgaatactatgttcagggtgagattcatttcacttcgtacccccactaacctcacttaccatatggataaacttgaagcaaagatattggattaaaccccatatggttcctatcctgtgtgtctcttccttccatcccagggccagactcagctccaaactatggtacccaagtgagagggccagactagtgcatccaaatgcttcccactaccatctctcagatgcatctaggatgttgtgaagctccaggtaggatgaattctgtctgggaggttcaggtgactcccgaccatgtcattatagcaagagacgaaattcactgtcaagttatggtaagaacttaggtgagggtgctgactcagtaaaaaggacctttgcatcctggcaccagagagattcagagacaagggagacagataaggaagaggaactgtattgtcagggttcgctcccttcccagatctatgcacaggagtgtcaggggacctaacaagtatatttgctgtggaggaaacttccccactgagccatcagcagtccgygtcctgaaacctcagcctctattacaatattagatctgtcttgggtctaatagggagagaaaagagagggccaaaggtccccacctgtgcatcttctttcttctccccagagttaaccactatcttgaatttgatcatttcccactgacagtatgtactccagtatgtattattccactttcaaaaaaacttttataaaaatgctgaatagtaccagtcatggttcaacaaggaacagatggcatactcaaaataggctaatttggccaggcgtagtggctcatgcctgtaatcccagcactttgggagaccaaggcaggtggatcacgaggtcaggagttcgagaccagcctagccaacatggtgaaaccctctctctactaaaaatacaaaaattagcttggcgtggtggcatgtgcctgtagtcccagctactcgggaagctgaggcaggagaatcacttgaactcaggaggcacaggttgcagtgagccgagatcaagattgtgttactgcattccaatctttccagtctgggtgacagaacaagattctgtctcaaaaaataaaaaaaaaataaaaaaataaatgctaattcaaggatggtttttttttttggagacggagtcttgctctgttgcccaggctggagtgcagtggcacaatctcggctcactgcaagctctgcttcctgggttcacgccattctcctgcctcagcctcctgagtagctgggactataggcacccgccaccacrcctggctaattttttgtatttttagtagagatggggtttcaccgtggtctcgatctgacctcatgatccgcccacctcggcctcccaaagtgctgggattacaggcgtgagccactgcgcctggccaaggatggttttttttgcagagattatttacaaaggtgtgggagtagggaaccacaatggatagatagggcaattaatcagggcttactcgaagtcaatatgttactgtctctaggtctgaaaggtagaggaaaaggagctgttaccagacccaaagtgagagggtcctttagagtctgttgccaccttgagagaagcaatgacaggttgagggacacaggtggccttgcagggaggggataaatacattgatctcactttcttctcttcttcctatttccttttggggcttttaattgacctaacctaactggaagcagaaagcacagaaatctgtttatatggtccattcatttaagaacacagagcaggggagggggctagagtggttttaggtgatggggtgggaaaaggaaaatatccagcatatacagtattgtcctatgacttgcttttttagttaacattatatttatgtgattcatccatgtcgatatgcttactgtaattgtagtagttcattcatttttcacttaaaaaattccattgtatgaatacaccagaatttatttatctatttctttttctttttttctctctttttttttttgagacaaggtcttgctgtgtctcccagcaggagtgcagtggcaggatcatggctcatggcagcctcccagcctcaggtgatcctcccacctcagcccccagagtagctgggactacaggctcgtgccaccatatctggctaatttttgtattttttgtagaggcagggtttcaccgtgttgctcaggctggtctcaaactcctgggctccagtgttccaccctcctcagcctcccatagtgttgggattacaggtgtgagccactgtgcctggcccagtttatccatttctgatgatggatggtttccagtgtttgagtattttgatattgccacgaatgttcttgttcatgttttttgatgtctacgctcaaaactttctctagagaatatacctagactagaatcacatagtgggataaagagtcatatgttttcaaatttaccaggtaatgccacatttttcaaagtagttgtatcaattaacagttttacttatagtacacgagttcctagtcaacacgcaatattttcaaactttgaaacttttgtccatctggcacctgtagaatattatctcattgtggttttaatttgcatttcttcaattactaatgtaattaaacatatttacatatgtttatttatcatttacatttccttcattgtgaaatacttgttcaggttccctttctcttttctactgtttattttattttatttttcttttttttaattttactttaagttctgagatacatgtgcagaatgtgcagtttttttgtttgtttatttttttttttagtatttattgatcattcttgggtgtttctcagagagggggatgtggcagggtcataggataatagtggagagaaggtcagcagataaacacgagaacaaaggtctctggttttcctaggcagaggtccctgcggccttcggccctgtttgtgtccctgggtacttgagattagggagtggtgatgactctttttttttttttattatactttaagttttagggtacatgtacacattgtgcaggttagttacatatgtatacatgtgccatgctggtgcactgcacccactaactcgtcatctagcattaggtatatctcccaatgctatccctcccccctccccccaccccaccacagtccccagagtgtgatattccccttcctgtgtccatgtgatctcattgttcaattcccacctatgagtgagaatatgcggtgtttggttttttgttcttgcaatagtttactgagaatgatgatttccaatttcatccatatccctacaaaggacatgaactcatcattttttatggctgcatagtattccatggtgtatatgtgccacattttcttaatccagtctatcacacattttcttaatccagtctatcattgttggacatttgggttggttccaagtctttgctattgtgaataatgctgcaataaacatacgtgtgcatgtgtctttacagcagcatgatttatagtcctttgggtatatacccagtaatgggatggctgggtcaaatggtatttctagttctagatccctgaggaatcgccacactgacttccacaatggttgaactagtttacagtcccactaacagtgtaaaagtgttcctatttctccacatcctctctagcacctgttgtttcctgactttttaatgattgccattctaactggtgtgagatggtatctcattatggacttcacgtccaaaacaccaaaagcaatggcaacaaaagacaaaattgacaaatgggatctaattaaactaaagagcttctgcatagcaaaagaaactaccatcagagtgaacaggcaacctacaaaatgggagaaaattttcgcaacctactcatctgacaaagggctaatatccagaatctacaatgaactcaaacaaatttacaagaaaaaaacaaacaaccccatcaaaaagtgggcaaaggacatgaacagacacttctcaaaagaagacatttatgcagccaaaaaacacatgaaaaaatgctcatcatcactggtcatcagagaaatgcaaatcaaaaccacaatgtggtgatgactcttaacaagcatgctgccttcaagcatctgtttaacaaagcacatcttgcacygcccttaatccatttaaccctgagttgacacagcacatgtttcagagagcagggggttgagggtaaggttatagattaacagcatcccaaggcagaagaatttttcttagtacagaacaaaatggagtctcctatgtctacttctttctacacagacacggtaacaatctgatctctctttcttttccccgcatttctcccttttcttttcgacaaaaccaccatcgtcatcatggcccgttctggatgattgctrtctctttggagctgttgggtacacttcccagatggggcggccgggcagaggcgttcctcacatcccagacggggtggcggccgggcagaggcgctcctcacctcccagacggggcggccaggcagagacacccctcacctcccagatggggtggccgggcagaggcgcccacttcccagacggggtggccaggcagaggcgctccccacctcccagacaaagagcggccaggcagaggcgcccctcactttccaggcagggcagccgggcagagactcccctcacctcccagacagggcagcagctgggcagaggcgctcctcacttcccagacggggtggcggccgggcagagacacccctcgcctcccaaacggggaggggccgggcagaggcgctccccacctcccagacgaagggcggccgggcagagacgcccctcacttcctagtctaggcggccgggcagagacacccgtcacctcccagacagggtggcggccgggcagaggtgcccctcacttcccagacggggtggtggccgggcagagatgcccctcacctcccagacggggcggccgtgcagaggcgcccctcacctcccggacggggcggccgggcagaggcgcccctcacctcccagacggggcggccgggcagaggcgctcctcacctcccggacggggcatccgggcagaggcgctcctcacttcccagacggggcggccgggcagaggcgctcctcactttccattcagggcaaccaggcagaggcgctcctcacttcctcccagacggggcggcggggcagaggcactcctcacttcccagagggggcggccaggcagaggtgctcttcacttcccattcggggcagccgggcagaggtgctcctcacttcctcccagactgggcggccgggcagaggcgcttctcacgtcccagacaatgggcggccaggcagagacgttcctcacttcctagagggggcggcggggcagaggggctccttacatcccagacgatgggtggccaggcagagacgctgctcacttcctagacggggtgaccggcgggcagaggctgtaatcttagcattttgggaggccaaggcaggccgctgggaggtggaagttgtagcgagccgagatcaagccactgcactccagcctgggcaacattgagcattgagtgagcgagactccgtctgcaatcccagcacctcgggaggcggaggcgggcagatcatccgaggccaggagctggagaccagcccggtcaacacggcgaaaccccgtctccaccaaaaatacaaaaaccagtcaggagtggcggcgcgtgcctggcaggccgaggcgggagaatcaccggagcccgaggcagggaggttgcagcgagccgagatcatggcggtacagtccaggctccgcaagaaagggagaccgtagaaaggggagaggggagaggggagacgggagaggggagaggggagaggggagaggggagaggggggagagggcttttctactgttttttatttttttcttattatcttgatactaacaatgaccctgtgttaattttatcatctcgcaatttgtggatatctaaaaaactgtgtatttatgtactttaaaaagttttatgtacttttaaaaaggtcaagtgtggtggcttatgcctgtaatcttagcactttgggaggccgaggcaggaggattgcttgagtccagaagttcaagaccagcctgagcaacatagtgcagccccatctctacaaaaaaatttaaaaatcagccagtcttggtggcatgtgcctgcagtcctagctatttgggaggctcagctgggaggatcgcttgagtccaggaggtggaggctgcagtgggcagtgatagcatcactgcactccagcctgggcaacaggaaaccctgtcttraaaaaacaaatgaacagaaactccctccccatgcaaaatcccttaagttcttaatttaatgtagttaaaatgatcaatctttctctttttagcttgtttttttaaaaaaagtttaaaatatacataacacaaaatttaccattttaaccatttgtaagtgtacagttcagtggcattaactacgttcacattattgtgcaactatcaccattatccatctccagaactgcttatgctttttcttaatgtcttgttaaataaattctttggaccatcaagaccataaagaccgtctatatatttgttttaaattcttaaaattttgcctttcatatacaagttcttaaatcatctggaattgattttttwtatagtaggaggtagggaatacatttttcctccctatagacagccaattgtcccagcaccatttagaattgtctatttttttcttccattgatttgtacggtggatctgtcatatactaagtttcctcataggtgtgggaccatgtttgggttttctattctgttccattgattgatgactttattcttgtaccaatattgtaatgtcttaaatactaatgaattaagattagccttccatctgcctgaaatgctattctcctaaagatagacatgactaaatcccaagttttcttctggtctctgtttcatggccacattcttagccagcctttcctggctatcttttctaaaatttcattatctccttgaaaaactttacattcttcttttctgattaatttctttctgtttagtagttgttatctaacataattatttatgtctttaacttgtttattgtctctcttccccattagaagatttataagagcaggattttttggctctctcatcattctcatatccccagcatagaaaatgttgcctggcacttagtaagtgtttaattactatttctggaacacaccaaataatgctgatatatggaagggtagtgtttcttcaccgtgctaccattaagaatgtgctttctgtcagttctcctgctccttgattttgactaataaagcaatctaaagcaaatggagagagaatgaagtgctttctttaggttgtttcccagccaactccgagaggtaggcagtgaaatggggagggtggagggccagaggttggctaactctgcattagcttttatgggtcagctatcttgctggaaatacctcatgttctctgcttttcatggcaaacacagctggtaggacctagaatttacagcatgcttactcagtaaagaagcttaccacgcctttggttttcagggcgacacaccccgctcagaagaggaatgaacactcacttagatttaccaagcatggcaactaaattctcagctgtaagtgtgacactttttgggatagaagttctggagctgtggaggagttatctcagggtgaatgccacgtggggcagtctgtctgtagctgggtaatgcccaaggcaggcactgaattgagcagtgatgattcatggaaattctgccagagaaggtactctgtgctttattacaggctaaactaggaagccaactcattctggaaggaatgtgtataatgttttcagatgaggacttgaagttttataggttggagtcacatttgattcaaaccatctgtttaatgggaagctgaacccagcattttttttcatatgtctctcacagtattcaacaattcagtatgggctgggcgcagtggctcacgcctataatcccagcacttagggaggccgaggcaggtggatcacctgaggtcaggagtctgagaccagcctggccaacgtggtgaaaccccgtctctactaaaaaagcaaaaaaatagctgggcatggtggcaggcgcctgtaatcccagctactcgggaggctgaggtaggagaattgcctgaacccaggagttggaggttgcaatgagccgagatcatgctactgcactccagcctgggcaacagagcgagacttcgtctcaaaaaacaaaacaaaaccaaagaaaaaacaaaaacaattcagtttcataagtatttattgagggcccatggagtgccaggcactggggtcacagaaatgaatgaaacagtcatccctgtttttgagatgctatggttcagtggaagtaaaacttacatgtttatgtatgttttccttcccatgattgtgaggtcaatgtctgtatttacaagaatcttggttgccagggctgagcattgtgtcaatcaattttttgtagatgaagtgaatacatgaaagagctcacagtgatttactgaacatggctgctgaaatgtataacattattgtgcattattgctaccgtgatatgcggatttatattgcaattgcctctggattcagaaaaacacccttcacagtgaggtagtgaccaaaactgtggcattaggaaacaataaaaatgctggaatagctgaccaacacagggtattttgttccccggggcttaaaatcagtttttaatatgatgaaaaggcagctattatgtgacatagtaagatattggtatgttaagcatgaacatatatttccagttttctctgagctggtcatgaaatgacactggctacttcgtcttttaattgggcagatattgtaggaagtactttggggatcacagagatgaacaaaagggctcatccaaagaaagcttaaaacctagtagtgctggaattcttaactagccacatatggtgatcttgaacctcttgaaatagtatagatgtgtgtgtaggtgcatttttctgaagagagctttcatcacattgtccagtggttcatagacctaattaacatccctctactacagaagttcttaatcttgatcttccaaaagataaagaacttctgtagtagagggctataattatttaaagaactacaccatatgggagtcatgaagagcctcaggggtttaaatgaggagcaaaacaggtggcaacactgagtagtttcattataaaatccttgacaattttgcaggagaaaatttctttgcctctagtgataaaaacatttttcatatttaacagtagttattttttctatgagttacctcttcttcttcttgtcctatttttctgtttgtgtcttaggatttttttcctaatgagttaacttctttgtatcctgatggcattaaccttttcgatgttatacttttggtagacctttctctagtttgatgagtgcaaaatacttctgtgaattttttacatgcataattttataytttttatggtcaagtctttatatcttttttctttgtaatttataatatttaaatttgtttgctatccagagataagatattcatgtaaatattcttatggtctgtgrtgcaggttttttcaggcagtttatatgctttcaggtgtcttctttggaccacgtgatgtatttgtattacgtatttgtattatgtatttaatacagagaggaagaaatgaggtgaagctctgctgtcatattactggaattggtgtagtgagatcgttagcacagtggggcctggagagtttctctgggtttgaacatggctctgacattttgtgtccttttgacttcatttaacttctctgttcttcagtttccgtatctagaaaatacgtttaatataataacctttgggaggccgaggtgggcggatcacgaggtcaggagttcgagaccagcttgccaacatggtgaaaccccrtctttactaaaaatacaaaaattagccaggcgcctgtaatcccagctatttgggaggctgaggcaggagaatcgcttgaatcccggaggcggaggttgcagtgagccargatcgctccactgcactccagcctgggcgacagaacaagactctgtctcgggtattggtggtgggtcggggggaataacctatcttatgtggttatgataataaaatgagttgatatgtaaaccacttagaacaggtcctgatataaagtcagtgccagccacagtttagtccaggctgggtagatgctttgaagcttgatattgtttcaatgtactttgcatttctaaaaacgtgaacatttcaaagcattcatttgatctcctaaggactacctataccggagcctcattccagcacatttgtaagcgaggcacgcctcctagargccacgagtgaagttaatttccagttctcgaaaatcttacagacagcggagaactggtgtggtggctctgacgccccgcttgtgagtctgcagtcggacatctggaaagtaagcggcacgtccgcgtgatttccagtgcttcatcttcttccaccctaccttccctccgaggctgggttcttctaattcctgtagattgcagagcgattcctgcgaatgtgccttctttcattcattctagttcattccacagataattcagctgcgcgcttcctctgtgcgaggcattgccggagagcggggagcgaattgaacgtggaacctgccagtaggggcttgccgcccaatacgaaattcaamatatgtattgtatgtagacgggcaaactaacgaggatcttgtaacttgttttctcatctgccaaatgggggtaatacgatcttataggaccttataggtcgctgaaagattaaacgagcggaaaaaaaagagcccctaatagtgagctaggtgcaaaaaagatcctaatgccttttttcctcattcctccccagattgaaagtgatgagtgccagccctgmgggttaaagcgccatattttcctcaatatagggaatatttgttagtgtccccagacgaagttacattggttcaattttcggcgtgtgggagttttcgccactagcattcagcaccccagtttyaaccgttaaagctaccgactccacatacaggaaatgcatcttaaaatttggaaaaaaaatccccaaaacactgacatccaaacactttaaagctgccaaggtggayggaacaccttgaattcccagacgcgctccactgagcatgcccagagcctcaggccaaaccccctcctacccgccaaggggaggtggggcagggctggccttctgtgctagtcacttcctcttccggtttcatatgaactctcccgccacccgggaacagtggctgccaccgtttgtgttttcccgagtttgaattcttgcaggtaggggaaacttccgcgaatttaggacagagagcaatcctgttattaaggcttgcaagtcgagagaaaggagagatggatcactttgcaggcagcagtagcagaaggacagacttggcgggttggttgtttggggcagacacccaggtaccagggaggagttggggagagataggtttgccagtggagtgaggaggggtgttggggatggaacttttgtaaggcacttgtggatgctcccgaaaaggagttccgaaagacagttgctctgtttcccagagtcataacagaggaagtgagtaactggacccagtccatcaagtaagaccctcatttagccagaacctacagcactttcctctaagttcaggattgcagaccacgtaaaaccttatgttaactcttgggatcgtaaagatccaagaacagtgacacacaggcctataatgagcaggcaacatcacctgactttcatgttgctgaaaattaggatcaccacctgcatctgctctagcgcctctcccacccccattacaaaattattataggtgtattgtagaaaatctggaaacgagagaaggacatcacccaggaattgccactgctaacattttgtgcatgccctcaaatccattttttttctgtgtttgtggaattattttttcgtgttttttcttttttttcccccaactttgttttccatcattttacgctttttgtgtacttccttctaaggtgaccaagatggagttttctggaagaaagtggaggaagctgaggttggcaggtgaccagaggaatgcttcctaccctcattgccttcagttttacttgcagccaccttctgaaaacatatctttaatagaatttgaaaacttggctattgatagagttaaatgtaagtactatttaaattagaatgtatatattcttgagaagctcacttaccctttgtgagaatgaatgaaggtaattcatttccttcattcagcaatccattcaacaagtatttattgaggtaattcatatccttcattcagcaatccattcaacaaatatttgttgagggtttggtactcattcatttatttattgtacaatgcatattattgagtgccattatgttctaggtggcagggattttgagatgaataatgttattttttgttgaagttttattctagtacatggagacagacatccaaaataatagtcataattcagtattttaactrctctagtagaagtaaatggtagtgctgttgaaacaaagaagtgggagtgactgacttagtcttattaaatgagcttcttagagaagttgaaatgtgatctggacatactgaagaatgagtagaaattttccagcagagaagaagtgargagtttttccaagctgagataatggcctatgcaaaggcttggagcatgaaagagaatttcatatttgagctaacagtaacaagttcaggaattcagggtggatggagaagtatggagggcattttgtgccatgctaatgatatgatattggggtgtaagaaggatgtggccaccgtcctgggggcctacttaatcctcagtgtgttgctagagaaaagaatgggctagacrtgaattgaaacagaaacactagcgttgtcttcagagtttatgttccaggatatccctgtggggaaatcagaaggaaaggtgagatactgttaatcattcttagaggagcagggtaagcactgctaatacagagaggaggcactcagtgcctgtgtgttgaatgaaagaatgaagacaagggagaaaagggttttagaaagcttagcagtgtcaatacttcatagggattaagatggtgattgaaaagtgtcccttgggtttgrcacttgaggtgaaatgataagggcctgaactatgataatgacaatggcagtggtaggaagggagagagttaagggatactgaggagttagcattgataggatttggtgactggatatgaggagtgagggagcaggtgtggagtggctgcagttcctgcttggatgatctgatgcatggaaactctgctgctggagatgggcatggcaggacgaagagtaggaatgaggggaggataattaatttggatacccatacctgtgggacatggggtttatgttcaggagacaattagaagttcttcattcttgacttcaaaaatgcctccagagaataattcatctgaggaaagattgatatggtgctttaggaacctttgaacagtatgtagcatctgttcaggatggttcatttggctgtttggatggcctttcttcttcactgttgtgctctgtcctcggcttcatcaggaaaggaagggatgctttttttctgttgaatctaygccaagtaaatgatgcctactgcctaacaggcagctcccatacgaaggatgcaaacaaggagtgcctagtttttttttccatactgacatacttttctgttcctcaggaatgattattcaccatccatccctcttccctgattgagaatccctggtattaaattatgctgtgggacatggatattttctgcacatagatggacattatcctcttataagcatatgtagtttatatgatgtcgttacaggaaataaactggcaattacctgtcatgttctgtaaacaagtaattatggaattgccctccatagattttgtcttggatttagttttaaaacattatcttgcatttataccttttttcttttttttagtgttaaaatcagttgaaaatcttggagtgagctatgtgaaaggaactgaacaataccagagtaagttggagagtgagcttcggaagctcaagttttcctacagagtaagtaaaaaaggaaaaaaaagttccttcagtttctatgcatttatgtattgagtgtcacttgtgggaaagatattatattaggcactgggcttttataaagactaatgtatcattagcctgaaggttcttcagtgtattaggggtgattgacatgaagtcagatgattataatatggcagggtttctcaacctcaggactaacatcattttgggtctgataattccttgttgcagggattgttctgtgcactgtaggatgctcagtagcatctctggcttctacccctacatatttccagacatgccaaatgtatcccgtgcaatacaggatgatgactgtgtttatagatgcatgctccaggaactccaaaaacatacataattatgcagctcagattggggaggtttgggaaggctttccagaagaggtagtagtggagctgcatgttgacagatgtgattagattttcattttggraagatgactgccagcagcagattgacagggtcatgtctgttaggagggaaaccagttagaagcccggaaatgatgagagtctgaattaaatgagagaaggggaccggttgaagagacattaagaaggtagaatcaaaaggttttagtgactgattgtagggggaatggagagagaagagttataaatgacacccaggtttctagttaggaaaattagtggatggtggtaatattttgagatgtgatatgcaggaggagaagcaagtcttggaagacgtagagtttagttcttaacatgaatttgaggtgcctgtggagatgtctagtggacaattggatatacaggtctgaatatacaggaagacatgtggtgggagtagatttagcagaaggttggaatcatcaggagtaggtaagagcaccctagaaaaatatttgagtgagaagagatgacrgtggaagttaagacatgaggaataccaatattgaaggtaaagtggaattggaggaatttgggaaggagaatggaaaggagctttctcagaagtaggagatgaaccaggatagtagtgtcatagaagccaaggagggctagagtttcaataataatgatcatgatattaataatgataatagggaataacagcagatatttatattaatagtatgtttgctwtgtaccagattttgttctaagtgcattacatatattaacccatgtatgtaattcatacagcagtcttatgaggtgggtattattatcatccctattttacagatacagcctatttattcacagactgaataacttgcccaagctcataagatggtaaatggtggagccaagatttgaatctgggtattttgtttctgtagtggtgcttttaaccacaatagtttcagaagcttaagatagattatgtaagatgaattgtacagtgtccattggatttagcagctggatgggcccttatagataggggcagagaccagaacaatgacagtggttggagaaggaaggtggagcggtggatatagaagatgtacttttttaaaatgtgtagctgaaaagagaagagaaatagggcagaatatagrggttgttttagggaaaagagaagatatacaagcacacacttgtacatatatgacaggagatacttaaacatgtttataagctgagcagaagakctagaatagaatggggaagaggggagcttgaagttgaaactttgagagagcatttgataagtcagggtctttaagaggcacaagcaaatgggttgyggggtttaggtgcaggaattagcttttcatatggtttggctgtgtccccacccaaatctcatcttgaattgtagttcccataatccccatgtgtcatgggagggacccggtgggaggtaattgaatcatgggggtggttacccccatgctgctrttctagatagtgagttctcacaagatctgatggttttataaggggcttttccctattttgctcagcacttctccttactgccaccatgtgaagaaggacgtgtttgtttccccttctgccatgattgtaagtttcctgagrtctccccagccctggggaactgtgagtcagttaaacctctttccttttatgggtttactcagtcttgggtatgtctttattagcagcatgagaatggactaatgtagctttacatgccaggaagaggagatgctttgtagagatgtatggaaggcaacacaacatgtgtatgcggaagcttgggactgaaggattctgcctggtagcctttattttctgtaaagtaggtgaagtcatctgttcagagagaagggaaaggtgctatagtaggggtcttgggacaactggtgaagactgacgattttctgagaagtgaggaaggagatgattttgtgtcgaatctcaacactgctgcttactctggacaagctttgtgaccctgaacaagttacataacttctctgtgcctcagtttccttatctgtaaaataagattatagtagtgcctccctcatagggttttttttttttttaaaggattaaatgggttcatgccttaaaaattcttagggcaccgcctggtacctagtgagtgctcaagacatgtttgttcttattattttggatccaactgttggtaaggatctagttgagattataggccacgaaattatattttccaaattcccatagttgtgttttttctccagaggttcttagcattttgagaataggactgcagagtgtagttgtagattaagaatctaggttttgccaaatggttgaaattaaagaagctgaggttggtgtaagaagtggttgaggtggtgagcaccttggatataggctggataagaagaaaattaaaagagaggggttggtgggaagaaaatagtgcggtccaaactcaaggggttttgtcaagattagtttacttctcggtttcatctgattgatagcttaaggtaaatgataattatcctgaaaagcatattaagaaatgttttggcaatgagaacacatggacacagggaggggaacaccccacaccagggcctgtcagggggttggggtcaaggggagagacagcattaggacaaatacctaatgcatgtggggcttaaaacctagatgacgggcagcaaaccaccatggcacacgtatacctatgtaacaaacctgcacattctgcacatgtatcccagaacttaaagtaaaaaggaaaaaaaaaaaagaaatgttttgggactgggtgtggtggctcatgcctgtaattctagtgctttgagggactagagtaggagtcttgaaaccaggagttcataaccagcctrggcaacatattgagactccatcatacagaagataaaaaattagcggggcatggtgggtgtcgcttgtagtcccagctgcttgggaggttgaggctggaggatcacttgagcccaggagtttgaagttacagtgagctgtgattgaccactactctccagtctgggtggtagagcaagaccccatctctaaaaaaagaaatgtttttgaaacttactttaccattggcttaggctggctcagtatttccttacacctcttaccattctaatgcatttattttattcatgtgtcattatttttaaggaaaacttagaagatgaatatgaaccacgaagaagagatcatatttctcattttattttgcggcttgcttattgccagtcgtaagtatatgtttatattctcacagtcaaatctggtgtcatgggttataaattggtgtgtggtaagttgatgtgttgtgctaaacataggaaaacccagaataacatcaggagccggttgatcatggggttgaacactgacagtaaattgtttggaagaaattgtttacttaaaaatattgaaaaaaattctatcgcagaattttgcctgatgaaacacttcttaagtttgtgagatagactcttcatttgggattttaaattggaaaggattttattgggaagaaggacttttgatatttttcctgcaaaaaaatggtaatatttataagaaacaattaatgaaacccacacttgaatttgatacaggtttttggaatttgagctctatgggccagttaaatckaagatatttttgtttggtagttggtttcttttaagttaatagtgccacccagaggtagtaaagttagttgcttttwtaaaaattgtttttccctcacatgttaattttggtcacataatttagttatggctgtctttttttaaaattaatargcttatcaagtgagactctggaattgcttactatcccaagataataattgagaaattacttaccagttttggttctagagtttttcttctgtaaaaaagcatatgtagtttgtgaaatttatataataaatatgttgctgacaatctgtgaaaatctcctaaaaatgtgaaatcatattttgcatccagtagggtaattattttattatataacgataatgcccattagtatctgccttataaatgaacgttattgcttttaaatattgtggtatatatgtgcatattaaattttgtgaaattatcaattataaagccataagcaaagtttcctttgcaaagttaatctgatcaaagttgccttaaaaaatttggtgtcttttatttggcatttataaagacacctcaagccaaaggagtgccccatttccccattttcttttttttttctcttttctctctctctctttttttttttttgagctagggtctcatgccattacctaggctggagtacagtggtgtgatctcggctcactgcagcctcaacatccgtgggctcaggtgatcctcccacctcagcctcctgaggagctgggactataggcacatgctaccatgcctggctaatttttttgtagatatggggttttaccaacttgcccaggctggtctcaaacttctgggctcgagcaatctgcctgccttgacctcccaaggtgctgggattacgggcatgaaccacgacgcccagcccctattttctaacataaaatgaatattttgcagttacattaaatgcatgaagtattttatgttatttaaaaataatgcagctagtctcgaagcattcttgtatttaatctttttaatttttaacaccccctataccttgtacccaacccatccttagaagattgtgatatgtggtattgatattctccttaccgtgatagaggacttgcatgtttttaactgctgtccattggcatcttgctgatgtttgaatattgttttataaacatttcttagatttaataattactggatttttagtttgtactcataatttctgtcttcatttcagtgaagaacttagacgctggttcattcaacaagaaatggatctccttcgatttagatttagtattttacccaaggataaaattcaggatttcttaaaggatagccaattgcagtttgaggctgtaagtatatttttgtagttatttctaattgttctcaccattcatttttcccttctgtcttaagtgctggtactaatgtgtagtgtgttctctttacattctccaagtacctgcctgaaacagtagctaatagctttggataacaatatatctttccttctctatgactagaagaaaagggactccttaataacaaagtctcacacttacttgctctgttaaatgtgtgctttattaaagcacaagaaggtttagtttataaaggttcatctttaaccaaaattttgtcggccaaaataaagctaataatgtgttaaactagacaagtggtagtttcttatttatagtcgtgaaatttagaggaggtaatactttatttaaaagtcagttgtcaggcggggcgtggtgcctcacacctgtaatcccagcactttgggagtctgtggtgggcagatcacttgaggtcaaaagtgcgagaccatcttgaccaacatagtgaaacccccactctacaaaaaatacaaaaattagccargcatggtgctgcgcgtccataattccagctagtcaggaggctaaggcatgaaaattgcttgaacccgggaggtggaggttgcaatgagctgagatcatgccgctgcactctagtctgggcgaaagagcaagactccgtctcaaaaaaaaaaataaaaaccataaatcaaaaatgtcagtaagatctgtatgaatagttttaaaaaataattttgcagacatatctgaatgatttacatattgtaattatataaaaaaagaagagatctttgggactcatttaatggggatgagtattggaaatagaatttgtatcttttttttttttttttttgagatggagcctcactctgtcatccaggctggaatatgcagtggcctgatctcggctcactgcaacctccaccttctgggttcaagcgattctcctgcctcagcctcctgagtagctgtgactacaggtgtgtgccaccatgcctggctaatttttgtatttttagagacgtagttttgccatgttggccagggtggtcttgaaccccctgacctcaggtgatacacccgcctcggcctcccaaagtgctgggattacaggtgtgagccaccgtgccgggcctagaatttatgtcttttaggtagatatatgccacaatgggaatgtagaaacattatgttttggaagttttagagcagtcagatggtagtaggactggcagagactctattttgttgttggaatgcgtggcttaaagccaaataaaataaaaaagtagaagttgcaataggtgaaagacattgtcctgtctgacaagtagaagacatatccactgtagcaaggaacactatggagtatatgagttagggaaaagagactgtgaagggaagtgaacaaacattttgtagacgtttagtgtcaaatatatgctaggtaggcagtttctatagtttctttcatttacttcatgaggtttctaagtcacatctacctttgcatagacagatgtcatgcatggtaccatctgaaccaaacccaytgcatcttccactttgcttttaactttgatccttggtgaagtccattattgcaattatcaattacagttaatttatccattcctattagaaatagtttattttttgcttttgttgaaattactgatttttagtaggtcatagagagaggtgtccttgagaaggtctattatttattctagggcagccatctccaacctttttggcaccagggactggtttcatggaagacaatttttccacggactgaggtcgggggatggggaggggtgtggatggttttgggatgaacagatccacctcagatcatcagtcattagattatcataaggagtgcacatcttagatctctcacatgtgcagttcataatagggttcgcactcctataagaatctaatgcctccactaatctgacaggaagtggagttcaggtggtaatgctcgctcactgctcacctcctgtgcagcctggttcctaatgggccatgtgctggtgctggtattgtggcctgagagttggagaccccagttgtagagtgtctcagcgtcacatatacttttttaaataatagatttattgagctagaattcacaaatcttgacatgcacccttttacaatgtataattcattggtttttagtgtaattacagattgtgcaatcaacactactatgtaattttagaacattttcacctaaaaatgaaacctcttacccatttatggtcattccctattcttcctctcccaacccttggcaaccactaacctgctttctgtctctggatttgtctattctgaacatttcatataaatggagtcatacaatatgtggtcccttgtggttgacttcttttacttagcataatattttcaagtttcatctgtgctgtagaatgtatcagtattaattttttaattgccaaataatattttacctgttcagcattygagggacatttggatggtttccatattttggctattatgaataacgctacagtgaatatttgtgtccaggtttttgtgtgaatatgttttcctttctctcaggtgtatacctaggagtagaattgctaggtcatagggtgattctgtgtttaaacttttgaggagctatcaaaatgttttccaaagtggctgtatcattatatatcttaccagcagtggatgagggttccactttctccatatcctcaccaaaaattgttaccttttaaaaaaatatagccatcatagtgagtatgaagtggtatgtaattgtggttttgatttgcatttctaatgaagctgaatatcttttcatatgcttattggtcatttgtatatcatctgtgaagagatgtctgttcaaatcctttgcctgttttgtagttgaattgtttggctttttattgttgagtgttctttacatattctggatacaagtccattatcagatatatgatttacaaatattttcccccactctgaaggttgtcttttcttgatggtattgtttgcaacaaaaaggtttttttttttcagatgaagtctaatttatctttttttcttgtcacttgtgcttttggtattgagtctaagaagtctttgtctaatgtgaggtcataaagatttactcctacagttttttckgtaagagttttgtagttttagctcttacgtttatatctgtggttcattttgtgttaatttctatacayggtgtgaagtaagggtccaacttcattcttttgcatgtagatatctagttgtcccagcatcatttgttgaaataaccattctttcctcattgaattgtcttggcacacttgtcaagtcagttgactgttgatatggtttgattgtgtccccacccaaatctcatcttgaattgtagttcccataatccccacgtgtcatggaaaggacttggtgggaggtaactgaatcatgggggcaatctcccccatggtagtctcatgataataagttctcactagatctgatggttttataaggggcctccccctttgcttggttctcattccctcccctgccgccctgtgaagaggtgccatctgccatgattgtaagtttcctgaggcctccccagacacgcagagggctcaggattaaacctctttcctttataaattacccagtctcaggcagttctttacagcagcgtgagaacagactaatacaactgtaaatgtaaacatttatttcagtactcttaattttattccattgatctgtctgcttatccttatgtcagtagtatgtggtcttgattattggttactgtggctttattgttaagatttaaaattgagaagtatgagttctccagctttgttcttttttaagattgttttggctgctctgggttccttgcattttttaatgaattttgggatcaacttgttaatttctaccaagaagctagctaggatttacactgggattacattgaatctgtagatcagtttgggaggtattcttttgtaatgatattaagtcttccaatccatgaacatgggatgtctttctatttatttagatcytctttaatttttttcaacaatgtcttgtaattttttgttacatttatacctaaatattcttcaatgttattgtaagtggagttgttttcttcatttcatttttggaatgttcattgctagtatataaaaatccaggtgatttttgtatattgatcttgtatcctgcaaccttgctgaacttgttttttttttttktttttgtttttttgtttttttgtttttttttttttgagatggagtcttgcactgtagccgaggctggagtgcaagctccacctcctggattcatgccattctcctgcctcagcctcccgccggccaccacaccctgctaattttttgtattgaacttgttttttaattctaacagttttatagtggattcattatgagattatgtttactacagagatattctgactcctttctaatcaggatgctttttgtttctttatttttgcccaattgtccagctagaatctccagtacagtgttgaatagaagtggcaatagcagtgatcatgatctcaggggaaagcatttagtctttcactatgttgcatggttttagctgtgagttttttttatagatgccctttatcagattgaggagattttcttctaattctagttgaatattttcattaagaaaggatgttgtattttgtcagtgcttttcctgcaccaattgagatgatcatgtggtttctgtcctttattaatatggtgtgttgggccgggcgcggtggctcacacctgtaatcccagcactttgggaggccgaggtgggcggatcacaaggtcaggagtttgagaccggcctgaccaacatagtgaaaccccgtctctactaaaaaaaaaataccaaaaaattagccagacgtggtggtgcgtgcctgtagtcccagctactcaggaggctgaggcagtagaattgtttgaacccgggaggtggatgttgcagtgagccgagatcgtaccactgcactccagcttgggcaaaagagtgagactttgtctcagaaaaaaaaaaaaaaaagttctgttacattaattgatttttggatgttacaccaaccttgcaatcctggaataaatcccccttggtcatgttatataatcttttaatatgctgcttggtttggtttgctagtattttgttgaggatttttgcatctatattgataagggatactggtctgtaggttttttgtgatgtctatatctggttttggtattaggatcatattggcctcatagaatgagttgggaaatgtttcctcctcttccgttttttggaggaggttgtgaaggattggtttaaatgtttggtagaatttaccagtgaattaatctgggcctgggcttctctttgtgggtcattaaaattaccaattcattctctttrcttattatgaatctatttaagttttatattactttttgagtcagttttagtaatttgtgtcttttttggaatttattcactttatctaagttatctaattgattcatgcagttattcatagttttctcttatccttttgatttctttaagaaaataaaaggattggtgatgatgtcttctctttccttcctgattttaacaattagagtcttctctttttttttgtcatctaggtagaggtttgtcagtgttactggatttgttcaaagaaccaacttttggtttcattgatttttctgtgttattctctagactctatttcactagtttttactacagtctttagtatttccttccttctgcttgctttggtttggtttgctcttttcttctagtttcttaaggtaggagtttagggtatttatctgagatattttttctttttatatgtagacatttacagctataaattttcctgtaagcactacttcagatgcaaaccatgagtttttgtatgctgtgttttctttttcatttatttcaaagtattcttttttactttgacacattgattagaagtgtttaatttccacgtttttgaatttcctgaacttctgttactggttttaatttaattccattttagtttgagaatatattttatatgactgcaatcttttaaaatttattgaattttattttatgacctagcatatggtctgttctggaggatgttccatgtgtgcttgtgaagaatgtgtatctgctattcttggttggagtgttctgtagatacagtctgtaagatctggttggtctatagtgcttttcaaagcttcggtttccttgttcatcttctgcctatttgttctatccattattgaaagtggggtactaaagtcttcaactgttattgtttatttattatctttaattctgtcaatttttgcttcatttattttggggctctcttgttagttgcatatatgtttataattgttaaatcttcttgatgggttgacccttttatcattatgaaatgttcctctctagtaacatttttttgttgttgttttaagttatgtttgtttgacattagcatagccattccagatcttttatggttgttgtttacgtgatatgtctttttctattctttttattttcatcctttatgtgtgtttgaatctaaagtgtgtttgttgtaaatatcatatagttggatcatcttcttttcttttttattcattttggaagtctctgacttttgcatggattgttttatccatttatgtttaattactgataacttagtatttccgtgtgccatctatgtgtttcctatgtcttaaggtttttttgtttctgtatttctccattactgccttctttgtattaaaatggtattttctagtgtaccattttaattcctttgctgtttattttactgtattttttgagttattttcttcgtggtttcccttagaattacaattatattttattttaaaacaatctagttgggattagcattaagttaatttcaatagtgtacaaacttttgttcccatatgctctgttccctactccctgccattgtcctagtatggtcatacaaattatttcttaatatatcaacagaggtaaactttttgtgttctagattgtatgaaaaatgtatttataatactgtcaaacttgagtgtagtttgccttggtatacaggcaaatacctgtatgttgggaatattttttattggcattttggagatattgcttgctgaaccttttagcttctagagttgctcttgagaagcctgatttcattttgacttcttattctttgcatgtaactttgtgtcctttgccagtcccactctcttgtgtagtgaactttcatggcgatgtctgcaccttttttcacttttttgggttgggaacttggtggactcttttaatctgaagatttgattcttcagttagaaaatttctttttattattgctttaataatttcttctatgttctctttttataacctcttgttaggtggaatttatattttctggattggtactcttattttcttttcggtcctgacattcaatctttgtgtttttattttattttctgaaaactttcatcaactgttttctcaattttctatttatttatttttccctcctgtgtttaatttttttcttttaaatttacttaaaaattgaatataaaattgtatgtattcactgtaaaatataatgttttgaagggtacattgtggaatgattacatctagctaattaacaaatgtattacatcaacagttatttttgtggtgaaaatacttaatatccactcacttagcatttttcatcaatacagtttgttgtcattaactgtagacatcatgttgtacaatgggtctcttgaacttaatactcttaactgtgattatgcatcctttaacagacatctccctaacctcttttcctccctaaccaccccagctactggtaatcactattttaccctctatttctatgagatcaacttttttagattccacatatgagtgagatcatgacatatttgtctttctgtgcctggctttatttacttaacgtaatatccctgtttcattcatggtgttgyaagtggcaggattttcatttttttttatgactcaatattattccgttatgtatatatattgcatttaaaaaaatccatgtatctatcggtggacacttaggttgattccgtatcttggctattgtgaatagtgctgcagtaaatatgggtgtgcagatgtcttcagcatactgatttcatttccttcagatacatacccagtaatagattttgctggaacatatggtggttctatttttaattttttgaggaactttcatattgtttttcatttctacaaaaaataaaaaatagctgggtgtagtggtgcacacctgtaatccagctacttgggaggctgaggtgggatgattacttgagcccaggtgttggaggctacagtggactatgatctgtagcccaccctgggctacagaacaagaccctgtctctcaaagaaataagaggataataacgattttcacctcacagattagtgaggtttaaatgaggtagtgcgtatagagtgcttagtactgtgcatggaatatatgctgggtagtaatattacggaggatacagaagcagcatatgcctgtattgtgaagaagttcggagtcaattagattgatatgtttttactgcaattaaaaaaatggttttggaataggaacagctccggtctacagctcccagcgtgagcgacrcagaagatgggtgatttctgcatttccatctgaggtaccgggttcatctcactagggagtgccagacagtgggcgcaggtcagtgggtgcgcgcaccgtgcacgagccgaagcagggcgaggcattgcctcactcgggaagtgcaaggggtcagggagttccctttcctagtcaaagaaaggggtgacagatggcacctggaaaatcgggtcactcccacccgaatactgtgcttttccgacaggcttaaaaaacggcgcaccaggagattatatcccgcacctggctcggagggtcctacgcccacggagtctcgctgattgctagcacagcagtctgagatcaaactgcaaggcagcagcgaggctgggggaggggcgcccgccattgcccaggcttgcttaggtaaacaaagcagccaggaagctggaactgggtggagcccaccacagctcaaggaggcctgcctgcctctgtaggctccacctctgggggcagggcacagacaaacagaaagacagcagtaacctctgcagacttaaacgtccctgtctgacagctttgaagagagcagtggttctcccagcacccagctggagatctgagaatgggcagactgcctcctcaagtgggtccctgacccctgacccccgagcagcctaactgggaggcaccccccagcaggggcagactgacacctcacatggccaggtactccaacagacctgcagctgagggtcctgtctgttagaaggaaaactaacaaacagaaaggacaaacacaccaaaaacccatctgtacaccatcatcaaagaccaaaagtagataaaaccacaaagatggggaaaaaacagaacagaaaaactggaaactctgaaaagcagagcgcctctcctcctccaaaggaacgcagttcctcaccagcaacggaacaaagctggacggagaatgactttgacgagctgagagaagaaggcttcagatgatcaaattactccgagctacgggaggacattcaaaccaaaggcaaagaagtggaaaactttgaaaaaaatttagaagaatgtataactagaataaccaatacagagaagtgcttaaaggagctgatggagctgaaaaccaaggctcgagaactacgtgaagaatgcagaagcctcaggagccgatgcgatcaactggaagaaaagatatcagcaatggaagatgaaatgaatgaaatgaagcgagaagggaagtttagagaaaaaagaataaaaagaaatgagcaaagcctccaagaaatatgggactatgtgaaaagaccaaatctgcgtctgattggtgtacctgaaagtgacggggagaatggaaccaagttggaaaacactctgcaggatattatccaggagaacttccccaatctagcaaggcaggccaacrttcagattcaggaaatacagagaacgccacaaagatactcctcgagaagwgcaactgcaagacacatagttgtcagattcaccaaagttgaaatgaaggaaacaatgttaagggcagccagagagaaaggttgggttaccctcaaagggaagcccatcagactaacagtggatctctcggcacaaactctccaagccagaagagagtgggggccaatattcaacattcttaaagaaaagaattttcaacccagaatttcatatccagccaaactaagcttcataagtgaaggagaaataaaatcctttacagacaagcaaatgctgagagattttgtcamcaccaggcctgccctaaaagagctcctgaaggaagtgctaaacatggaaaggaacaactggtaccagccactgcaaaatcatgccaaaacgtaaagaccattgaaattaggaagaaactgcatcaactaacgagcaaaataaccagctaacatcacaatgacaggataaaattcacacataacaatattaactttaaatgtaaatggactaaatgctccaattaaaagacacagactggcaaattggataaagagtcaagacccatcagtgtgctgtattcaggaaacccatctcacgtgcagagacacacatagcctcaaaataaaaggatggaggaagatctaccaagcaaatggaaaacaaaaaaaggcaggggttgcaatcctagtctctgataaaacagactttaaaccaacaaagatcaaaagagacaaagcacgccattacataatggtaaagggatcaattcaataagaagagctaactatcctaaatatatatgcacccaatacaggagcacccagattcataaagcaagtcctgagtgacctacaaagagacttagactcccacacattaataatgggagattttaacaccccactgtcaacattagacagatcaacaagacagaaagtcaacaatgatacccaggaattgaactcagctctgcaccaagcagacctaatagacatctacagaactctccaccccaaatcaacagaatatacatttttttcagcaccacaccacacctattccaaaattgaccacatacttggaagtaaagctctcctcagcaaatgtaaaagaacagaaattataacaaactatctctcagaccacagtgcaatcaaactagaactcaggattaagaatctcactcaaaaccactcaactacatggaaactgaacaacytgctcctgaatgactactgggtatataatgaaatgaaggcagaaataaagatgttctttgaaaccaacgagaacaaagacacaacataccagaatctctgggacgcattcaaagcagtgtgtagagggaaatatatagtgctaaatgcccacaagagaaagcaggaaagatccaaagttgacaccctaacatcacaattaggattagaaaagcaagaacagacaaatttaaaaggtagcagaaggcaagaaataactaacatcagagcagaactgaaggaaatagagacacaaaaatcccttcaaaaaattaatgaatccaggagctggttttttgaaaggatcaacaaaattgatagaccgctagcaagactaataaagaaaaaaagagagaggaatcaaatagacgcaataaaaaatgataaaggggatatcaccactgatcccacagaaatacaaactaccatcagagaatactacaaacacctctatgcaaataaactagaaaatctagaagaaatgggtaaattcctcgacacatacactctcccaagactaaaccaggaagaagttgaatctctgaatagaccaataacaggatctgaaattgtggtaataatcaatagcttaccaaccaaaaagagtccaggaccagatggattcacagctgaattctaccagaggtacaaggaggaactggtaccattccttctgaaactagtccaatgaatagaaaaagagggaatcctccctaactcattttatgaggccagcatcatcctgataccaaagccgggcagagacacaaccaaaaaagagaatttgagaccaatatccttgatgaacattgatgcaaaaatcctcaataaaatactggcaaaccgaatccagcagcacatcaaaaagcttatccaccatgatcaagtgggcttcatccctgggatgcaaggctcgttcaatatacgcaaatcaataaatgtaatccagcatataaacagaaagacaaaaaccacatgattatctcaatagatgcagaaaaggcctttgacaaaattcaacaacgcttcatgctaaaaactctcaataaattaggtattgatgggacgtatttcaaaataataagagctatctatgacaaacccacagccaatatcatactgaatgggcaaaaacgggaagcattccctttgaaaactggcacaagacagggatgccctctctcaccactcctattcaacatagtgttggaagttctggccagggcaattaggcaggagaaggaaataaagggtattcaattaggaaaagaggaagtcaaatcgtccctgtttgcagatgacatgattgtatatctagaaaacaacattgtctcagcccaaaatcttcttaagctgataagcaacttcagcaaagtctcaggatacaaaatcaatgtacaaaaatcacaagcattcttatacaccaacaacagacaaacagagagccaaatcacgagtgaactcccattcacaattgcttcaaagagaataaaatacctaggaatccaacttacaagggatgtgaaggacctcttcaaggagaactacaaaccactgctcaaggaaatgaaagaggatacaaagaaatggaagaacattccatgctcatgggtaggaagaatcaatatcgtgaaaacggccatactgcccaaggtaatttacagattcaatgccatccccatcaagctgccaatgactttcttcacagaattggaaaaaactactttaaagttcatatggaaccaaaaaagagcccgcatcgccaagtcaatcctaagccaaaagaacaaagctggaggcagcacactacctgacttcaaactatactacaaggctacagtaaccaaaacagcatggtactggtaccaaaacagagatatagatcaatggaacagaacagagccctcagaaataacgctgcatatctacaactatctgatctttgaaaaacctgagaaaaacaagcaatggggaaaggattccctatttaataaatggtgctgggaaaactggctagccatatgcagaaagctgaaactggatcccttccttacaccttatacaaaaatcaattcaagatagattaaagacttaaacgttagacctaaaaccataaaaaccctagaagaaaacctaggctttaccactcaggacataggcatgggcaaggactttatgtctaaaacaccaaaagcaatggcaacaaaagccaaaattgacaaatgggatctaattaaactaaagagcttctgcacagcaaaagaaactaccatcagagtgaacaggcaacctacaaaatgggagaaaattttcgcaacctactcatctgacaaagggctaatatccagaatctacaatgaactcaaacaaatttatgagraaaaaaaaacaaccccatcaaaaagtgggcaaaggacatgaacagacacttctcaaaagaagacatttatgcagccaaaaaacacatgaaaaaatgctcatgatcactggccatcagagaaatgcaaatcaaaaccacaatgagataccatctcacaccagttagaatggcagtcattaaaaaatcaggaaacaacaggtgctggagaggatgtggagaaataggaacacttttacacagttggtgggactgtaaactagttcaaccattgtggaagtcagtgtggcgattcctcagggatctagaactagaagtaccatttgacccagccatcccattactgggtatatacccaaaggactataaatcatgctgctataaagacacatgcacacatatgtttattgcggcactattcacaatagcaaagacttggaaccaacccaaatgtccaacaatgatagactggattaagtaaatgtggcacatatacaccatggaatactatgcagccataaaaaatgatgagttcatgtcctttgtagggacatggatgaaattggaaatcatcattctcagtaaactatcacaagaacaaaaaaccaaacaccacatattctcactcataggtgggaattgaacaatgagaacacatggacacagcaaggggaacatcacactctggggactgttgtggggtgggggtaggggtgagggatagcattaggagatatacctaatgctaaatgacgagttagtgggtgcagcacaccagcatggcacatgtatacatatgtaacaaacctgcacattgtgcacatgtaccctaaaacttaaagtataataataatttaaaaaaatggtgttgagtctttttgttttaggaaacaggaatttatgggaaatgtatgcagttttaacaagagtgttggtgtttaaaattactctagttgcttctagtctgtttgccatattttatttatttataaatttatatcctgtttcactttgctaatcatttgaggtgcattataatgaacctgtgcattaaagtaagatgcataaatttggataaacttgaaagattggctgaagtgatgattaatatccgtatgtatacatcccagtgtggtgttatacagcttctaaagggagcagtaactttgccttcttgtgtgactattttgatttttctagttcagtgattctcagtggggggataggatggagaggtagtcctcctagggtgtttattagaacgtcggtggaggttagtatagagtatagaaaacattatgccttatgtttttgaaatataaaccatagaatgtaaagcttgatcaagtatttgtggctgatggggattcatggaagatagagtaacaaagtattgcagagggcttgacagaataaccattcccgtgatagtctgcaatcactttccaggcagagaccttttcccatctttttcatggactctcccatggcatctgatactggtaattaaggcacttgaattcaggtgctgttgattagcttgtccccaggtctctgtaagctctttccatttcattgtaggctttcccaatttttatcatttcattaataggaacatgcacactttcatcactttggttagaatatttagtttgcatttgaaaactgctatagctagtcaggtatcagtgatgcttttagactcatgacaaagcaaggtttggggaaaagttactagcatttgtttcatgaggtggtgtctgatgtgtgacctgctgcctaagtcaggtgctgctgcataagttgaggtggaaggaaacagcagggagtgggcagccacggggccatcttgtttgtcacagaagctggattgttggcacacatgtctttgagtcaacctggacttaaagtgcttgtgtgctgtgtttgtgtgcatttctctgtcttttcggtttcctcaatgctgcagttgcttttatgttgatctacttctgtaaaataaatatatttttaccttaggaggagatgcagtgttatacctgagttgtattgtgtccttcgatggagaaatatgtacataaaaagggatcattaatttctggtgttctattactgacttgggcagtgcattgatacttttttagtctatactgggtttctggtggatagtagattctgaatccttatcatgtagtataggaagccttaatatgaagtgttcaaaaaggaaactgatatttttcattctttgacctatatgtaaataaattggattttaaatctgaaatttctaaggcgtttcaatgagtaaatattgctgtccatggtgactattttgcatctcccactgctgagttgattgacttaaccttggtcacattaaaggtgaatgggtaaggttaaacagattctattaatgtttcttcagttggccagttagggaaaggtcagctttggcagctgtcagccttacagacaaagggtttctgtgctctcgcagtctagagtctgacagcagcttctaatttacttggatgctttttaaaacctccttaagacagtcaagaaatatttcttattggctttgcaataccagtgggtctaatggtaggatgcttttcattagagtactacagaatggcagggacagtgaaaatgagcattcttaaagatgtggaagaatattctgtgtgtcacaaatgatgactctrcctcatattaaaaagacctagtgttcagttgctatttatgttcagggaagtgagggcttttrggtgaaggcaagtgaagttggtaacctcgttgcctcactraaaacaagtacacgtaaaactttgaattacttctgtttatttaaaagtagtttttcttatcctgagcctgacatctaaaatttgtttctcatcccttttagtttaaagccttaatttcttttatcttagaaattatttcatgtcattcttggttggtaattacttttcagtgaggatgaattcaagtttaatttgtcatttgttattgaaaatgtcaattatgaatttattaggagcctttggaggcttttctccagttaacattggaacattgagtttacgttgatttaatagttttaggtgtattgaattttaaaatacttttggtattctgtcttgatttctgagatactgcaagttggccttaaatagtcatagttttttgatcattttggcccttactgtgttgtttttattgtttattggtatagtttgggttgtcatagttcgtttcgaatgtgtattcattatcatgacctactccatttctattatgtaaaatatgaacatcccatgcattgatatacatgactytctttatacctaccctcttgggtctcaagttattataagcctattaacaagttgcaaagcaatttttgtgtgatgcctgcaaaatagagagctgtgtgtacctttttatatcttttgacacagaatgaactttgatacagccaataaggagtctggtggaacagctgagacaggacacacagatgtaacagtagaacaggctagagaacacatgtgtttgataagcctggaagcttttcacasggcttctggcaagccgttgactatgacaggagtgaaaatggagcctgaagaagagtgaagtgggatggtaaaacacacactctcaaacactcttagtggaaattacgtaaaaggaattaggaggaacgggattaataatcagatgaagagtgttaaagaaaaaaaattattcatgtcatttgttaaggatagtaaggaagactttattcaaaggggctactataataggtttttgtagtaggggagagagagaagctgaagttggaatatgataggataggtggggatttggagcaggggtcagggtggatggaaaattattaagaggtagtaaagtgacctagggaattttgctgaaggcagaccaggatcataagatattaaagatggtcagacgaagggtgggggattttccctaaacttacttagcaggattctcactgaaactgaattagcaggccttatcaagaagaggtttcaggagcttgacaagagttaggtcaaggagagagtctttgtcaagtgtcaaacataacttctgaatagagaaataaattgttttatgttccaaggctgtgaagtaggcaagattgacagtcccaggcagggtactctctgagtgttgagtgaatgtttaatgtctagagaaaatactaactgaattcaaaagatttatctcaattctgtttcataaacactagacatctttaagatgagtatagcaaaattgagtaattattttttttcaaggttaaatattagataataggtatatgttatatatgaaatgagcttttctattgagctagatttgagggattatgctgccttgcaaacttttatttgttctgtttctagggaagtttatgatttagaaagagcactgtgtatttctgttacaattgaatacctttcaaaatgatttaaatgaaggcattaacacagggcttcctttttaaaagtaaacactacaagtataatacttttgttctcatagtggtttttggcatcaaattattatggaagccaacctggtattattttatgtatatttattgggcagttacagtaaaatattgatacattttatatttggagaatggagaaaagtttattaagttttctagttagttgaggcctaaccatttatgcatatagttgtaaaaatacaccatggcagatggtcttagtgacaatattttagagttcacagaatttgggtttttctaatcaacctacaaaattagattctgctcatgataatatggtttaagcctagagatgctatggctaaatgtgaaacttcaagctgaattacccttaaaggctaaaattatcatatgcagaaatttccaaaatgacttgtgaaagtcatttctcttttttaaagttttcatatagcttttgaatataggactctttgtattcttattgttgatggctttccatgcctataacttttgcccttgaaaaaaaagtatgtctttaaatgagctgaagtttcccccacacagagctatgtcctatttgttttataatgatatatatctatttcaattttattaatttttttttttgagacagggtttcactccattgcctagcttgagtgcagtgacgtgatcttggctcactgcaacctttgcctcctgagttcaagggtttctcttgcctcagcctccctaatagctggaattgcaggcatgcgccaccaggcccagctgatttgtgtattttttgtgtttttagtagagacggggttttgtcatgttggccaggctggtctcaaactcctggcttcaagtgattcatccacctcagcctcccaaagttctgggtctacaggcgtgagccaccatgcctgatatatatatatgtgtgtgtgtgtgtgtgtgtgtgtgtgtgtryrtacatacatatatatttatatcctcaaagaatgaaattaattacactaaatataattttcagtgttaaatattctctgtagtttaccatttacattatggaatgtagtttccagaaaggggttctgatccagacaccaagagagggttcttggatcttgtgcaagaaagaatttgggatgagtccgtagagtaaagtgaaagcaagtttattaagaaagtaaagaaacaaaagaatggctactgcataggcagagtagccctacgggctgctggttggctatttttaaggttatttcttgatcatatgctaaacaagaggtggattattcttgagttttctagggaagagatggacaattcccggaactctgggtttctcccctttttagactatatagggtaatttttggatgttgccatggcatttgtaaactgtactggtgctggtgggagtatcttttarcatgctaatggattataattagcatatagtgagcagtaaggatgaccagaggtcacttttgtggccatcttggttttggtgggttttggctggcttctttaatgcatcctgttttatcagcagggtctttaggaccttttgtcttgtcatagccagtcttgctgaccctttgtctcatcctgtgcctgagaatgcctaacctcttgggaatgcagcccatcaagtgcgagcctcatttgatccagcctttgttcaagatggagttgctctcgctctactagagtcttttggcagtgttactcatggtttctgaaggtgttctgaaaaaagatactgagcttttaaatgtatactttttttttttgagacggagtctcactctgtcgcccaggctggagtccaatggcatgatctcagctcactgcaacctcctccgcctcctgggttcaaatgattctcctgccccagcstcccgagtagctgggattacagtcgcccaccaccatgcctggctaatttttgtatttttggtagagacggggtttcactatattggtcaggctggtcttgaactcctgaccttgtgacccgcctacctcggcctcccaaagtgttgggattacaggcgtgagtcaccacgcccagccatgtatacatttttaaaaattccataatctttataatctttccctctttcctccaagttccctgaaaagttaattctttttggctgaagtcttgtgtcatggtctagttcagagtctaggtcagattgccttatcctaggtcttttggatgagaataagaaccagggatgtggagggcaaatggagttgtaaaggtaatcattttgtgttctcagtctttgagtggcttaatctgagttacaaagggaggaggaagtagttgcktaacaratccatttggyccaggccctgtgaatatatccattctgctactccccacccctctgaaggcatacaaaggacaacagcacagttaatacccctattctggacttgtctccatttattctctgcttgcttctgtttgtttatctccatgactttcaaataccttgtgctgtacttcrgctattgatacctgcctcctgtctggctttgtttcctgttcatctctggtcaaagtgtgctctccccattccaggagaatccttctgttatcttggagcttaatagccaaatatattccaattccctttagttggtccaaggaataaggcttctgtatgaatattggaaaacccagaggactgtttccagacttggatggggtccttgttttctaaaggaggaatatttattgatgactgtataagtagtggacttattaaggtttagatttatctggtgatataaggagactgaggagagattatcactaatagctaacatttgtaatgtgtttgttaagtgccaggcactttggtaaatacttcacatgggtaaaaaaatttaacttcttcttctgtggtagagacagttttgctctgtcgcctaggctggagtgcagtggtgtgatcacagctcactgcagccttgaactcttgggctgaagtgatcctcccacctcagcctcccaagtagctgggaatacaggcgcatgccaccctgcctggctaattttttcttttatagaaataagttcttactgtgttgcctaggctggtcttgaacttcaggccttaagtgatccttgcaacttggcctcccatagtgctggaattacaggtgtgagtcactgtgaccagccaggtttatgtaatttaatcctcacaacagctccatgaggaaactgaagctcagacaggttaagtaactttccttaaaattagtcttctaaatatttagagatgtataagtcacaaagcatgttactaaatatatgagtagatttcttcacagcttaactattgaaatgaagtggaatagatgctgacatttaaggtgacagggcccatcaaaagtgctatacaaacacaggtgtgagtttagagatttacattagtttcggaaattaaagcattaactataattttactgagatgtttcattttagctgacagttgttggcaggaatggaaaccaaatatattaaatataccattggtagctttctcggtataatattgccatctctagggaaaacattatattcayccaacttagtcgttgaggggtttgttttctagcccgtagtttttctatgccctttttgtttttcttctctgctaccttttgtttatctttttaaaaacatttttcagatcacattgtatattttagttcatgttcaacaattaactcatgtataatattcaaagatcagtgtaaatcaaaatccaggcagtaggtaaaaaatatatttttaaaattttaaattaagttttatcaggcagtagattttgtacttgaagtgggagtcattattttaataggccaggaaaagaaaagttatggacttgagttggttttttttactatctcacaagagagatgccatagaggaaagcctactgtttcaaactgagcctttcacaaggatggcttgttggttcagtccagtagttctggactataggggttatagtcacccctgctggatattttggccatctttatggtatttttggtgtttgtaaaaatgattggcaagtccaacaggtgtttagtagacaggagatggggatgctggtgcatttacagtgcactgagtagttctgtacaaccacagattttcccacatccttcctgcccttttttttttttttttttttgagacagagtctctctgttgccaagctgaagtgnnnnnnnnnnnnnnnnnnnnnnnnnnnnnnnnnnnnnnnnnnnnnnnnnnnnnnnnnnnnnnnnnnnnnnnnnnnnnnnnnnnnnnnnnnnnnnnnnnnnnnnnnnnnnnnnnnnnnnnnnnnnnnnnnnnnnnnnnnnnnnnnnnnnnnnnnnnnnnnnnnnnnnnnnnnnnnnnnnnnnnnnnnnnnnnnnnnnnnnnnnnnnnnnnnnnnnnnnnnnnnnnnnnnnnnnnnnnnnnnnnnnnnnnnnnnnnnnnnnnnnnnnnnnnnnnnnnnnnnnnnnnnnnnnnnnnnnnnnnnnnnnnnnnnnnnnnnnnnnnnnnnnnnnnnnnnnnnnnnnnnnnnnnnnnnnnnnnnnnnnnnnnnnnnnnnnnnnnnnnnnnnnnnnnnnnnnnnnnnnnnnnnnnnnnnnnnnnnnnnnnnnnnnnnnnnnnnnnnnnnnnnnnnnnnnnnnnnnnnnnnnnnnnnnnnnnnnnnnnnnnnnnnnnnnnnnnnnnnnnnnnnnnnnnnnnnnnnnnnnnnnnnnnnnnnnnnnnnnnnnnnnnnnnnnnnnnnnnnnnnnnnnnnnnnnnnnnnnnnnnnnnnnnnnnnnnnnnnnnnnnnnnnnnnnnnnnnnnnnnnnnnnnnnnnnnnnnnnnnnnnnnnnnnnnnnnnnnnnnnnnnnnnnnnnnnnnnnnnnnnnnnnnnnnnnnnnnnnnnnnnnnnnnnnnnnnnnnnnnnnnnnnnnnnnnnnnnnnnnnnnnnnnnnnnnnnnnnnnnnnnnnnnnnnnnnnnnnnnnnnnnnnnnnnnnnnnnnnnnnnnnnnnnnnnnnnnnnnnnnnnnnnnnnnnnnnnnnnnnnnnnnnnnnnnnnnnnnnnnnnnnnnnnnnnnnnnnnnnnnnnnnnnnnnnnnnnnnnnnnnnnnnnnnnnnnnnnnnnnnnnnnnnnnnnnnnnnnnnnnnnnnnnnnnnnnnnnnnnnnnnnnnnnnnnnnnnnnnnnnnnnnnnnnnnnnnnnnnnnnnnnnnnnnnnnnnnnnnnnnnnnnnnnnnnnnnnnnnnnnnnnnnnnnnnnnnnnnnnnnnnnnnnnnnnnnnnnnnnnnnnnnnnnnnnnnnnnnnnnnnnnnnnnnnnnnnnnnnnnnnnnnnnnnnnnnnnnnnnnnnnnnnnnnnnnnnnnnnnnnnnnnnnnnnnnnnnnnnnnnnnnnnnnnnnnnnnnnnnnnnnnnnnnnnnnnnnnnnnnnnnnnnnnnnnnnnnnnnnnnnnnnnnnnnnnnnnnnnnnnnnnnnnnnnnnnnnnnnnnnnnnnnnnnnnnnnnnnnnnnnnnnnnnnnnnnnnnnnnnnnnnnnnnnnnnnnnnnnnnnnnnnnnnnnnnnnnnnnnnnnnnnnnnnnnnnnnnnnnnnnnnnnnnnnnnnnnnnnnnnnnnnnnnnnnnnnnnnnnnnnnnnnnnnnnnnnnnnnnnnnnnnnnnnnnnnnnnnnnnnnnnnnnnnnnnnnnnnnnnnnnnnnnnnnnnnnnnnnnnnnnnnnnnnnnnnnnnnnnnnnnnnnnnnnnnnnnnnnnnnnnnnnnnnnnnnnnnnnnnnnnnnnnnnnnnnnnnnnnnnnnnnnnnnnnnnnnnnnnnnnnnnnnnnnnnnnnnnnnnnnnnnnnnnnnnnnnnnnnnnnnnnnnnnnnnnnnnnnnnnnnnnnnnnnnnnnnnnnnnnnnnnnnnnnnnnnnnnnnnnnnnnnnnnnnnnnnnnnnnnnnnnnnnnnnnnnnnnnnnnnnnnnnnnnnnnnnnnnnnnnnnnnnnnnnnnnnnnnnnnnnnnnnnnnnnnnnnnnnnnnnnnnnnnnnnnnnnnnnnnnnnnnnnnnnnnnnnnnnnnnnnnnnnnnnnnnnnnnnnnnnnnnnnnnnnnnnnnnnnnnnnnnnnnnnnnnnnnnnnnnnnnnnnnnnnnnnnnnnnnnnnnnnnnnnnnnnnnnnnnnnnnnnnnnnnnnnnnnnnnnnnnnnnnnnnnnnnnnnnnnnnnnnnnnnnnnnnnnnnnnnnnnnnnnnnnnnnnnnnnnnnnnnnnnnnnnnnnnnnnnnnnnnnnnnnnnnnnnnnnnnnnnnnnnnnnnnnnnnnnnnnnnnnnnnnnnnnnnnnnnnnnnnnnnnnnnnnnnnnnnnnnnnnnnnnnnnnnnnnnnnnnnnnnnnnnnnnnnnnnnnnnnnnnnnnnnnnnnnnnnnnnnnnnnnnnnnnnnnnnnnnnnnnnnnnnnnnnnnnnnnnnnnnnnnnnnnnnnnnnnnnnnnnnnnnnnnnnnnnnnnnnnnnnnnnnnnnnnnnnnnnnnnnnnnnnnnnnnnnnnnnnnnnnnnnnnnnnnnnnnnnnnnnnnnnnnnnnnnnnnnnnnnnnnnnnnnnnnnnnnnnnnnnnnnnnnnnnnnnnnnnnnnnnnnnnnnnnnnnnnnnnnnnnnnnnnnnnnnnnnnnnnnnnnnnnnnnnnnnnnnnnnnnnnnnnnnnnnnnnnnnnnnnnnnnnnnnnnnnnnnnnnnnnnnnnnnnnnnnnnnnnnnnnnnnnnnnnnnnnnnnnnnnnnnnnnnnnnnnnnnnnnnnnnnnnnnnnnnnnnnnnnnnnnnnnnnnnnnnnnnnnnnnnnnnnnnnnnnnnnnnnnnnnnnnnnnnnnnnnnnnnnnnnnnnnnnnnnnnnnnnnnnnnnnnnnnnnnnnnnnnnnnnnnnnnnnnnnnnnnnnnnnnnnnnnnnnnnnnnnnnnnnnnnnnnnnnnnnnnnnnnnnnnnnnnnnnnnnnnnnnnnnnnnnnnnnnnnnnnnnnnnnnnnnnnnnnnnnnnnnnnnnnnnnnnnnnnnnnnnnnnnnnnnnnnnnnnnnnnnnnnnnnnnnnnnnnnnnnnnnnnnnnnnnnnnnnnnnnnnnnnnnnnnnnnnnnnnnnnnnnnnnnnnnnnnnnnnnnnnnnnnnnnnnnnnnnnnnnnnnnnnnnnnnnnnnnnnnnnnnnnnnnnnnnnnnnnnnnnnnnnnnnnnnnnnnnnnnnnnnnnnnnnnnnnnnnnnnnnnnnnnnnnnnnnnnnnnnnnnnnnnnnnnnnnnnnnnnnnnnnnnnnnnnnnnnnnnnnnnnnnnnnnnnnnnnnnnnnnnnnnnnnnnnnnnnnnnnnnnnnnnnnnnnnnnnnnnnnnnnnnnnnnnnnnnnnnnnnnnnnnnnnnnnnnnnnnnnnnnnnnnnnnnnnnnnnnnnnnnnnnnnnnnnnnnnnnnnnnnnnnnnnnnnnnnnnnnnnnnnnnnnnnnnnnnnnnnnnnnnnnnnnnnnnnnnnnnnnnnnnnnnnnnnnnnnnnnnnnnnnnnnnnnnnnnnnnnnnnnnnnnnnnnnnnnnnnnnnnnnnnnnnnnnnnnnnnnnnnnnnnnnnnnnnnnnnnnnnnnnnnnnnnnnnnnnnnnnnnnnnnnnnnnnnnnnnnnnnnnnnnnnnnnnnnnnnnnnnnnnnnnnnnnnnnnnnnnnnnnnnnnnnnnnnnnnnnnnnnnnnnnnnnnnnnnnnnnnnnnnnnnnnnnnnnnnnnnnnnnnnnnnnnnnnnnnnnnnnnnnnnnnnnnnnnnnnnnnnnnnnnnnnnnnnnnnnnnnnnnnnnnnnnnnnnnnnnnnnnnnnnnnnnnnnnnnnnnnnnnnnnnnnnnnnnnnnnnnnnnnnnnnnnnnnnnnnnnnnnnnnnnnnnnnnnnnnnnnnnnnnnnnnnnnnnnnnnnnnnnnnnnnnnnnnnnnnnnnnnnnnnnnnnnnnnnnnnnnnnnnnnnnnnnnnnnnnnnnnnnnnnnnnnnnnnnnnnnnnnnnnnnnnnnnnnnnnnnnnnnnnnnnnnnnnnnnnnnnnnnnnnnnnnnnnnnnnnnnnnnnnnnnnnnnnnnnnnnnnnnnnnnnnnnnnnnnnnnnnnnnnnnnnnnnnnnnnnnnnnnnnnnnnnnnnnnnnnnnnnnnnnnnnnnnnnnnnnnnnnnnnnnnnnnnnnnnnnnnnnnnnnnnnnnnnnnnnnnnnnnnnnnnnnnnnnnnnnnnnnnnnnnnnnnnnnnnnnnnnnnnnnnnnnnnnnnnnnnnnnnnnnnnnnnnnnnnnnnnnnnnnnnnnnnnnnnnnnnnnnnnnnnnnnnnnnnnnnnnnnnnnnnnnnnnnnnnnnnnnnnnnnnnnnnnnnnnnnnnnnnnnnnnnnnnnnnnnnnnnnnnnnnnnnnnnnnnnnnnnnnnnnnnnnnnnnnnnnnnnnnnnnnnnnnnnnnnnnnnnnnnnnnnnnnnnnnnnnnnnnnnnnnnnnnnnnnnnnnnnnnnnnnnnnnnnnnnnnnnnnnnnnnnnnnnnnnnnnnnnnnnnnnnnnnnnnnnnnnnnnnnnnnnnnnnnnnnnnnnnnnnnnnnnnnnnnnnnnnnnnnnnnnnnnnnnnnnnnnnnnnnnnnnnnnnnnnnnnnnnnnnnnnnnnnnnnnnnnnnnnnnnnnnnnnnnnnnnnnnnnnnnnnnnnnnnnnnnnnnnnnnnnnnnnnnnnnnnnnnnnnnnnnnnnnnnnnnnnnnnnnnnnnnnnnnnnnnnnnnnnnnnnnnnnnnnnnnnnnnnnnnnnnnnnnnnnnnnnnnnnnnnnnnnnnnnnnnnnnnnnnnnnnnnnnnnnnnnnnnnnnnnnnnnnnnnnnnnnnnnnnnnnnnnnnnnnnnnnnnnnnnnnnnnnnnnnnnnnnnnnnnnnnnnnnnnnnnnnnnnnnnnnnnnnnnnnnnnnnnnnnnnnnnnnnnnnnnnnnnnnnnnnnnnnnnnnnnnnnnnnnnnnnnnnnnnnnnnnnnnnnnnnnnnnnnnnnnnnnnnnnnnnnnnnnnnnnnnnnnnnnnnnnnnnnnnnnnnnnnnnnnnnnnnnnnnnnnnnnnnnnnnnnnnnnnnnnnnnnnnnnnnnnnnnnnnnnnnnnnnnnnnnnnnnnnnnnnnnnnnnnnnnnnnnnnnnnnnnnnnnnnnnnnnnnnnnnnnnnnnnnnnnnnnnnnnnnnnnnnnnnnnnnnnnnnnnnnnnnnnnnnnnnnnnnnnnnnnnnnnnnnnnnnnnnnnnnnnnnnnnnnnnnnnnnnnnnnnnnnnnnnnnnnnnnnnnnnnnnnnnnnnnnnnnnnnnnnnnnnnnnnnnnnnnnnnnnnnnnnnnnnnnnnnnnnnnnnnnnnnnnnnnnnnnnnnnnnnnnnnnnnnnnnnnnnnnnnnnnnnnnnnnnnnnnnnnnnnnnnnnnnnnnnnnnnnnnnnnnnnnnnnnnnnnnnnnnnnnnnnnnnnnnnnnnnnnnnnnnnnnnnnnnnnnnnnnnnnnnnnnnnnnnnnnnnnnnnnnnnnnnnnnnnnnnnnnnnnnnnnnnnnnnnnnnnnnnnnnnnnnnnnnnnnnnnnnnnnnnnnnnnnnnnnnnnnnnnnnnnnnnnnnnnnnnnnnnnnnnnnnnnnnnnnnnnnnnnnnnnnnnnnnnnnnnnnnnnnnnnnnnnnnnnnnnnnnnnnnnnnnnnnnnnnnnnnnnnnnnnnnnnnnnnnnnnnnnnnnnnnnnnnnnnnnnnnnnnnnnnnnnnnnnnnnnnnnnnnnnnnnnnnnnnnnnnnnnnnnnnnnnnnnnnnnnnnnnnnnnnnnnnnnnnnnnnnnnnnnnnnnnnnnnnnnnnnnnnnnnnnnnnnnnnnnnnnnnnnnnnnnnnnnnnnnnnnnnnnnnnnnnnnnnnnnnnnnnnnnnnnnnnnnnnnnnnnnnnnnnnnnnnnnnnnnnnnnnnnnnnnnnnnnnnnnnnnnnnnnnnnnnnnnnnnnnnnnnnnnnnnnnnnnnnnnnnnnnnnnnnnnnnnnnnnnnnnnnnnnnnnnnnnnnnnnnnnnnnnnnnnnnnnnnnnnnnnnnnnnnnnnnnnnnnnnnnnnnnnnnnnnnnnnnnnnnnnnnnnnnnnnnnnnnnnnnnnnnnnnnnnnnnnnnnnnnnnnnnnnnnnnnnnnnnnnnnnnnnnnnnnnnnnnnnnnnnnnnnnnnnnnnnnnnnnnnnnnnnnnnnnnnnnnnnnnnnnnnnnnnnnnnnnnnnnnnnnnnnnnnnnnnnnnnnnnnnnnnnnnnnnnnnnnnnnnnnnnnnnnnnnnnnnnnnnnnnnnnnnnnnnnnnnnnnnnnnnnnnnnnnnnnnnnnnnnnnnnnnnnnnnnnnnnnnnnnnnnnnnnnnnnnnnnnnnnnnnnnnnnnnnnnnnnnnnnnnnnnnnnnnnnnnnnnnnnnnnnnnnnnnnnnnnnnnnnnnnnnnnnnnnnnnnnnnnnnnnnnnnnnnnnnnnnnnnnnnnnnnnnnnnnnnnnnnnnnnnnnnnnnnnnnnnnnnnnnnnnnnnnnnnnnnnnnnnnnnnnnnnnnnnnnnnnnnnnnnnnnnnnnnnnnnnnnnnnnnnnnnnnnnnnnnnnnnnnnnnnnnnnnnnnnnnnnnnnnnnnnnnnnnnnnnnnnnnnnnnnnnnnnnnnnnnnnnnnnnnnnnnnnnnnnnnnnnnnnnnnnnnnnnnnnnnnnnnnnnnnnnnnnnnnnnnnnnnnnnnnnnnnnnnnnnnnnnnnnnnnnnnnnnnnnnnnnnnnnnnnnnnnnnnnnnnnnnnnnnnnnnnnnnnnnnnnnnnnnnnnnnnnnnnnnnnnnnnnnnnnnnnnnnnnnnnnnnnnnnnnnnnnnnnnnnnnnnnnnnnnnnnnnnnnnnnnnnnnnnnnnnnnnnnnnnnnnnnnnnnnnnnnnnnnnnnnnnnnnnnnnnnnnnnnnnnnnnnnnnnnnnnnnnnnnnnnnnnnnnnnnnnnnnnnnnnnnnnnnnnnnnnnnnnnnnnnnnnnnnnnnnnnnnnnnnnnnnnnnnnnnnnnnnnnnnnnnnnnnnnnnnnnnnnnnnnnnnnnnnnnnnnnnnnnnnnnnnnnnnnnnnnnnnnnnnnnnnnatgagatttgcaaatgataatgtatagggagaacactggatttcatcccccaatacccacttgagttctttaactgtgctacaaatatatgtagagtaataagttataagaacttcagtagtataaagctaatagaacttgaaatactagagtcttattaaaatgaataagcacagatttgagtccaaatcttcttttcatgcagtctgaggaggttagggatatgtgtaaattgttgctaaactgacagctattggaagaacctgatcatgagcactttttacatttgaattcaaagggtaaaaggggaggttcctttaaatttagttattttttggcttttagaggattagatttgtgataggataaggaataatagagtgctgttgattttatcctggctaagattaatagtctgtttgccacttctatgcctaaatgtctctagaatctgtccatctcctttcagtttcattgtcattattctagcttgggctaccatgatttcttatccaatccattcttttttttttttttttttttgacacggagtcttgctctgttgcccaggctggagtgtagtggtgcaatctcagctcactgcaacctcggcctcctgggttcaagtgattctcctgcctcagccwcccaagtagctgggactacaggcgcacaccaccatgcccagctcatttttgtagctttagtagagacagggtttcaccatgatggccaagctggtcttgaactcctgactttgtgatccccccacattggcctcccaaagtgctgggattacaggagtgagccaccgtgccggcctatccaatccattctttaccctgaagcaagagtgcagatatttacagatgtctatgctacagcccctccccaactcttcagcaatttcctattaatataatgttaatcttcaaaatttgtaataagttacctcaagctctcatccctgtttacctccctagcctcatctcttaccactaatctgtaaactctatggaccagccatgtgaacttcctttagttgtgaaaacatgttttttccccttgactttggatactcttccctacatttcgtctaattctgactcatctgtcatgtatcagcttaaacagttttctttctgggacatttccttaagtttagcgtagaaacccatcctctgtggcttttttttttttttttgagacagtttcgctcttgttgcccaggctggagtgcagtggtgcgatctcggctcactgaaacctctgccttctgtatgttcaagagattctcctccctcagcctcctgagtagctaggattacaggtgcctgccaccactcctggctaatktttgtatttttagtagagatggggtttcaccatgttggtgaagctggtatcggattcctgacctcgtgatccacccgccttggcctcccaaagtgctggggttacaggcatgagccaccgcacccggcttcctctgtcagagcacttgtacttgagggttatcacccgcctgtcttgaaatgggctctaagtctcctgaaagcaaaggaccctgaatatggtgtttattacctaacacaatgtctagcctataggaggtacttaatrtatgttggttgaacaaaggagtaaataaatgaagtagctacctacagttgttccccagaagatacattacttaagcaccctagaaactgtttggccttttgaatgtttattgtaaagtttaaattctcagtygtttgttcttagtttgtgctaacagcttcataaaatgggtrgatcaagcaatagtgtgcagttagcaaactgggtccacaaactcaagattcaaatcacttttggctaattgtgtacttatggacatcagattgctcttgyattaaaatttattaggcagactttgagtgggaaaataaaaatcttgattyggtagatgctggagaacagtaaaaaatagaaamatttgcaggttggtgagatttcccagattcagtgtgtggtgtatctctaaagttcaaaatccttcaagaaggttgctggtgtatgctgggtgtcagaacaggagagatgtttttaacacctagcacagctgcaaactagrtggtctggaatttgcaagtacatctttcagttttatttcatcttgaagctttcaygtgggtttaacagttattcaatgtaattgaagttaatgtagctaaaattgcatattatttttgaagtgttaagaatgaaaataatttatggtctttaagaatgartatgccaatatttcatattctgtattggcagtacagtaaaaattaattattttyrctrtaagtattatataaataataaagatatttaggagggagtatatatgctwataggaaataaatgttttgcctcccaggagatcatcttagctggtacagtggattaaaaatggcctcaaattatttgayattttctcattgagaagtgggatctatgtcaccaccccttgaatctcagtagctttaaaaaattatggttaaatatacataatctttacattttaaactatttttaagtgtacagttctttgtcattaagtgtattcacattgttgtgcaaccatccccattcatctccagaactttttcatcttctccagctgaaactcattaccctttaaatactaactcctcattcttcccctgcccacctcttgatgtgagtgggttttggcaaatagagtatggatggcagcagtgacagagtaccagtgtctgggtacaggctttaagaaactgggggcttccactttctgtctctggtacacagtcttcaggagctctgggatgccattaagaattctaagtagacttgatggagaatctgttctgaaacctggcagtaactagtaattgccatrctggagaggcatgttgacattcccacctgagcccagccttttaagcatccctgtcamggtgccatacatgagagcagagccatctaagaacctccagattaatctgttcaccagctcagtacctctggtgacttcatttggtgccacatggagtagagacattgycagcagcaccctttctgaatacctgaccatcagaattgagagctgtaatacaatggctgttattttaaactgttaagttttgggatagtttgttatrcagtgayagataattagaactggtagctagagcttctggcttcttgagtttgagctgaaaatagcaatcagtgtatcctaaatacctcaaaacaactgtactatgatttggaaagactatataaaatgtaatgaaagatrctattaacaattaaataatatggaaaatgaaattccaataattagttgagtggagaagacaactctgaggagcccagattacttagaagggacagaaatgggaaaattgttgataaatgcttttcacctttcagaaatttgattggtgaatctgcttaaaagttagctgagaagtttgtggctttttcattttgaagaagagatttgccaggagtctgagaatcctttaaattyttccaaagacagctttattatgtttaggacagtggaaagtaatgtaataaggtataaggtatgagataatgaggttgatgtttttatgtggtgcycttagccccttagagtttgccaaaatttaaagcagaccaagtttaatgagtgtacttcatagtatagattgtggacagtcctttttgcttgctaaattcartttagctcagatggtgaataccaatatgttcagagtactgtgtaggtgctatgggggatttaaaaacaccttcttaagtagaaagaggtataaataaatgaatgaaacaatcataagttactatagacaccacattatacaggcttcttaatttttgtatgccatttctaaatggttgcagatttttctccttttattttcagcatttaatgctttatattggctcttgatatatggagtttggattatggaaggtaagggggagattttaattcatatggaaatctatggaaattatttcttactgaaaaactgaaaatagataaaataaaaaaatacaatttcgtaagtccaggaaagcaggacagttgaggcctaataatacccttttgtgttggcagacagatttgctgctattatgacactttgcttaaggaatgggagtatcgtggatgaatacaaacctatacacagctgtttgtgtttgctgcacagctttctggataccttaagctgtatcacttttggattgtaatgattttactggaggcaagaaacaaagtgaacaagatacagcatcaaaattctcttttaagtttcccaaggctgctcttatttctctctacaaaatagaaataataattttgccytttttttgataacactagcagtagcaagcaaagtatagataagaacaagtgacatattttgagtaagtgatcaatgtcaggatctttacagagaacaatargatggatctaaaatgaatgaactgagtgttttctctttttttgcagttttggggggcatcraatgaaaatggccacatttaggtagggtaggagaacaggctttggaaggagcgggtattttattacagtgtgaataaaataaatatttagaacattayaagaatgatggctgacactgagagattcatgttaatgttataggtttctcaaggctgataggagctcttatattgtatttctaatgtagaggaatagaaggaaakctatggatggggtgcagaagaatggccctttggcagtgtmggtagtgctgcttcctgtcacactctagtgttacagcacttataaactggatgtgccttctgaggatactatcctttctgagtgcatcgtggcctcttcctatatttgaatccatgttttaagtgcagatgaagcgcttggacactgtggcactgtaagtaggattagaaccgtgacttaggatagggtataaccaaggggaggaagcttggtggaccttgaagtaagataaatgtgtgagtagcctctttctccttcttgatgcagggcacatggatgagatggttgggaaacactttttaagtccctgtsaatgtcaagaagtggcttgaaggggctttaatctctcaatcccttccccaccaaggtaccccagattaatgaacaattgataaaaagtgtgctttctatgcaaatgtgtcttttaagataagttccctagcaaaatcccactcctaagcacatcctatgtagaaattctggagccactgttgtcctttatattattttatagctaatatttaataaatgctttatgtgtgtccagcattrtgttgtatgttatggaagatttgcattaacatgtttatagttgaagagagcaggaaaagwctgatttcaggaaacagaacaaggtaaaataatctggtgtcagaatatttmatatggtctacaagggttatrgggggaaaaaaaagtgggcattgccatgggctggattaatgtaggaaggcgtcattgagctgacagctgtgaacagcatcttaaaagataaggcagaaaggaggtagcagagatactccaatggatggaatatcatgtgccaactgcaactttaaatgtctgaataattttctgaggaactaaaaatattgaattgggtcaacaaataggatacctttgtcaaagccatagagctgacttctaatattttcagttacaaatatatatatttgagcatcttttagaataaacacctcccttcccttcacaccaggtaaaaaaatagctggtattctaccatccatatgaatttgaaatatacgatagaaatataaatttagtaacacctgacttattaaaaattgccaaagatttgatttcctatggtctataagagaaaattgctacaaatcaatttattttttggaatttatttttccttactcttattgcttgaataaacgtggctgcatcagtggttcatgttgactcaaagcaagtttctccctttcctctccagctaaggaaagccatatttttttttgtactatgctactgttagctgcttggcttggaagacttcggttatcattatatctttcatgactcagaatctggctgcctctctttcaatgatcttgaaaatgtccaagatgctgcatgatttagaaatgtagaaccaagttaagttgaacagttttctactgggctacattgtaaaaatgggaaagggaaattacttcctttttttttttggaaaacacttgccagttggagcctcaaagaagattgagtttgagaggcctttaattgtgcaccaaaaggttattgcagaagataacataarggagatgtcataaagaagaaaatttgaagctcagtaagagaaagctgtgtgaaaaaataggcattctgccaattaactgggtgcttgaaataaatagtttgtaattaaagaaacggttgcaaatttcaaagacttgatcagtttaacttagctcatagggaaaccggggtggtggtgggtacaaatttcagttgtgaaagcatgcttactctcattaaagttttgcttatcattcattaaatatttactgtttgtaaggtttagtaatataagatcagaaagtttgttaatctaatatttaatgttaaattattgaaataaaatttcaactacatttgggtaaaagtgaattatgatcttaggagttcagtcatgaactattgaccatctcagtagttartatttcccaaactgggcaaagtatgggtgagagtgtgtagaggggagacccaagaaaacatagaaatggtccatcacccttgggtctactcatctactgaagaaccatgacacaattatatatgtaagcaattagtaataaaatatcatatgtttataagtataaaggagacatacaagaaaacattaaatgttcatctttccatacatgtctgtcttcatgttgcattagtttcaagtgaaatgtgtttttttatgttttattactatatactataccttttcatccaaagaagaaataagagattgtctcctttattggaagacatttttgctggatgtagaattctaggttggcatgtactttcttttagcacattaagatatatcactctgctgccttctggcttctcctcttgctgtggggaaatcagctgttagtctaactgtagctcatttgaaggtaagacagccaccctgctcttagtctccttttaagatattctatttaatttacttttgtttgatttaaatattctgtttgtctaggagtagaattctttttatttatcctgcttgagtttcaccagcgttcttgaatttgtagattggtgtcttatattaattctggaaaattctcagccattattgcttttaaacttccctctacctgttctttctcctctctgtctggtgtgttagtcaactgtattttaggtcttcttagtcattcacttttcatcctcaggttgtgtcttccttctttttgttctttctctgctgagttacagattattttttctgaactatttcccagtttgttatttctatattctgttttgtctgttctactcccattgaattttaaattttggctactgtaatttatttgttttttttttttcacatctgctatgttgctttttatggattcctattccttgcagatattttaatatttgcttttctttttcaaatttgttgtaggttgctttttaatctgtctgataattctaagagttaaaatctgtgtggtctgttcctgctatggtttgtgattgtctttcacccatgttgccttatttccttgcgtggttggttatctttaactggttattgccctcccacagccttttttcaggacattttcagggtgaatgtgctctcctctgagaggtactgtgtttgcttttgccaggtttctgagagtattactttaggggtattatgtcaggtattaagtcaaggacactttttaaaccgtatttaggattgtgtctctggcccatccacaccatatataytttgggtggccacagcttctcaaaaacttcattttyctacctttttcttttcctgctttgctcagtgacaagtcagcttgcccttcgttcttctgtggttaggagagagatggtgggtcaattctagttcactctttctctgaagatgttcttcgtttgggtctccagtttaatatagggagggcctcttgcaagagtcttccgcttggcaggccctaatccttgtgttttgctaccttgccccttgagactgaagatctgaagtatgaggagatggcatttactaatgtcctcagagcaaaaatggcattagttctcctgggtttgcctcaaaatttggccaacaagttcccttttaaactaaatattagtttaacagtatttttaaaatgctgttaagctaatatttttaagtgttttgtccatcatttttgttgttttcagtgagatgtagatctgaataacttaagaaatcagaaactgctaatagcacggagcccatctgctgctgtgctgttggtgatgttgcaaatygttcccctctccccttaacatattctgagcctcaagtcaagacagcttactgggctggagaggtgatggtctaaagaattataaagattttttaaaaatttaagttaaaatagcttcttaaattattatatcaaattaatagagaagtattatttctttaatttgtttaactrcccttgtgctcatctggagaaactgtcaggaaagatgatttttattaaaggcactgctgttacattcactcaggcatgattctgtcataacttcttggtatttcctttctatctttcttaattgcatgttttccctccatctctgtcacagtgccaattctaggactgccttattactgcttgttggtctagcaacttcttaactgttctttaattattagcggaattgaacattattttgtgtgtatgaatttttgtgccttttcgtgaattaatctgttttttatcttttgatgaatttattttattacatcctatcattaataatttttagtcttttggggtttcatcacacagaatatttatttttctcttattctaagcttttctgtatttcttcagtttgaatattgtcactttccatagtttgtrtatttcagtcagtaaacattgcatcaggtattgtggtaagaactgggaatataggctgtgtgcggtagctcgcgcctgtgatcccagcactttgggaggccaaggcaggaggattgtttgagctaaggggtttgagaccagcctgggtaacataatgagacccggtctctacagaaaattaaaaatcagctgggcatggtggcgcgttagcacgcctgtaatcccaggctatttgggaggctgaggcaggagaattgcttgagcttgggagatcaaggctgtagtgagctgttccagcctgagcwrcagagtgagaccatatctcaaaaaaaaaaaaaaaaaaaaaaaaagaactgggaatataatcgttatgacayatttacctgtgcttaggttcatatgttagtgagggaratataaatgcttatagtattgtacataaataatataaaaaaaaactgtatcttcaagcagacaggtatgtaccagcatggaggtgggagtaactatgcctaaggaaatctggtgcaactttgcagaggtaacctgttagttgcatagaaatttgccagtagaaacacagggtatagaaagacatttcagatgtgggaaatatgtgtaaagtcatagaagtgaaagaaagacatggtgcgctataggaagtgcagataggttggtataattggagggcaaagtattttaggggaagaaaattgaaactagaaagagtttaaaggcctgggataaaaaggaactttgatggacacaaagagcctgtgtagtggggataatggagtaagtgagcaggaaggacatggagatgtggttggggaaaatgtgtgagggtaggggtgatgcgttgcttgtgaattgtgctgtgatcgtgggagtgggctgcagaagtggagkgtgagtgggtcagaggatgcygrcgactgtgaaactagtgttgactggatcatccatatgggtgtagcagtccatttggacagtggcaagaargtggatgttrtgatgtcgacaagatttggatttgkaccgtgcctgttccagttttagtactgraagtcccacatccttagaaacctctcattcctggacaaactgggatkgttggtcacyataatgaggtgccagaaggatatgatgaacttgaggcattgaaacgtggagagcaataatctgtaagtggggagcagctggctagggtggaggaaaaaggagggaataaagttatgttaatttatgctagcacggtgttctcatgagatagcaaggaggtagaggtcttgattaaattacctattttttttcaaaaatatttgttttcttgtagaagagaagaaatatgctttagtataagtaaataatctttcctttttagtgttaattttactatattccaaatgtgcctatgctattaaaaaagaaacagtaatgaagtaaccagacaattgatttttatattgattagcttgacagtattactgagacatcaacatactaattagaatgtcaggatattaaattattcattttctaacttttaatgttttggatgattataaatgacaaaaaaatttgtgagtgaagtaccatactatcctatcaattttagttaattaattcagccacagagtggtaattatttccttttttattttctatttttgtctctttgttaaagattttccaattaaaattttttcctattatatggctctcctttatacatttaaatgaagaaagtactttgtaagaactggattacagatagaaaaaaatgtttaaaactaacttattttaggttgataaatatttgggttatttatcactgtgtcagaaatacctccaaacctaaaacaacaattccaaaacctaacattaaaacttaaaatcaaaacttaattctaaaacttaaaacagtacccatcttattatatctcacactttcgagggttagggattcagaatgggcttacagggcaattgttctgttccacatagtattatatatgggctttcttagttgacaactagtctggtctaggatgtctaagacagctttactcacatgcttgtgcatatgtgaggacttctaaaaggctggactctgctggacgcctttccatgtgatccctcaaacgaggtggttggacttcttacttcatgatctaggactccaagtgaacaaggcagaatctgccagtcctctcaaaaaataggcctgggcctggcagggcatcactcgttcctgtcaaagtagtcacaggccaggccagattcaaggggagggcaaatagatcttagctctcaacggaggatgtgtcaaagactttgcagccatctttaatccccatgtactccagattgatgattacatcacagtgcatttgggaaacaaattgccctttataatcacagtatttgctaccaatatagaacctatatttatttgaaatgataataacagtattaaaaattatgatatttgctttcagcatttgatctattcacagttttaatttctttataaatgaaatgattcctaattgttttatatatatcatatatatatcatacatttattttagaaaagcggattcttttcctgggatatgctgtttagaccagtgatgtatgtcgaaccactaatggaccttaaaaaaaaacatacagctcagggcttcagtctgtaggtctgggtggcaccaggaatctgtaattttaaaaagcttcactggcaagtaatgtacatacttacttaatgaccagggtctaagaaagctctgtagattcaaatagaaactatccaaactatttataaatgtgattgagtattgttgattggaagcttatagaagcttaaatctctgggaagccttatttatatctttacttttgatgccagtgtactagactagtggttccaacatggcatccccaagatgatcatttgggaatgtgggaaagaaataaataatacaacatatatttttagtctcatccgttccacattttggggatgggtatggcatgttttaagtgcagaatgtacagtaatacatacatataatttataaataaatatacatatattggaagtatgtgctgaaaaaacttcattgatgacaatgtgtgatgcaaagatgaaggtcactgttccagtcagtttagtttatgcattggtaacgacccccaaacctcagtgacttatagaaaggtttgttccttgttcatattctgtgtcttcatgggccagctacaaccctgctgtgtgtcattttgtccctggactcaggcagatcgagtaggctctgtataccggaacttcaccagttgctgcggcaaaaggaggagagaactgggtaaaatacatgctcagaaagcttttgcttaggaataacacacgtcacttccactcacatttcactggccaaagcaagtcacttggctacactttagttcagcaggtagggggtgtataattctccctcagtgagggactcagtacagggtgaatagcgatacagtctacacagacatccactacccttctatttactgtgtagagtatttgcctctctagagctgctccttaatctgctttcaggatttcaacagagtgaaattgcctctctcagttcctggtttgatgaagaatataaaaaagaaaaagacacacagccaaaatccttaattctgttagcaaggcagcatataaaacaacataattttggaatatggaaatataactttgccaaaacagttaaaacccagtgtaatttttacttgataaaaaactataccgttataccatgtgctaccatttgaaacaytcaggtactgactgttgagtgggtggatatgaataatagggattgagatgtggggaattatgagtagtagtggcaagagcagaacttcaaagctagaatgttcagagtctctgttgattggacattaatcagagtgaaggttgagcatctctaaaatagtaatgtaagtcactcaaaaaatgtgtgtttcatgttgagccatttgtttatacacctctttttaggaggatgtttactttgtgaagcatactacaccttgattataagatgttgcagtgataacctagctggcttttatcagttattttgaattcccctatacaccaagacctgtgytagtttaatgaaatgacaagtttatagaaactgcattagttgcagtaaacatttcactttattacttgaggaaaaagcctgaaatayagaaactaatcaaaatgtaaattacaggtagtaacaacaagtgtttaccatgtactaagggtgtgctgtatgttaggcctattgtacacacttyacrtactttatttaatcccaagaaaagctacatgagataggtatgattttcttcattttatccctgaagaaactaaggtgtaaagaggttaactaacctgtttaagattcaaagacaggtttctatgattttgaaaactattctctctactactttactctgcttttataattgttccactctatctgtttttacttgtattctttgttagtagaagtaggaagccatttaatcttgtcttgctctttcagagaatgagtattttttttaggtatgcagcaggtaatctcatttaggagaacctaaataaatgaaatatccttatattttgtccaatagtttttaaggagaaagcaagagtaaagagaatattcaggattattttaggatttcaaaataatgaagttaatagcagtttatactaattatttaatagtaaagtttctgacagtcatcctacatttttcaatgagaattgtcttgtattttccatttccattttggttataactaaatagataaatgaagatttagaatttgtttgacaaatggatgtattttttaattcatcaaagaaaaccagaatatttactcataggccatgaaacaggaagtgacatgaaatttagatcgaagtgcatgatttagagtgtgtttgcttactttgggtgaaaagtttagaaacacattgaattccttagaattctatctatarcyttttttttttttttttttgagatggagtctcaccctgccaccygcgctggagtgcagtggtgcgatctcagctcactgcaacctttgcctgcctcctaggttcaagctattttcmtgcctcagcctcctgagtagctgggattacagcrtggsccaccatgccyggctaatttttgtatttttagtaaagatggggtttcaccatgtyggccaggctgggctcaaactcctgacctcaggtgatctgcccacctcagcctcccaaagtgctgggatttcaggcatgagtgactgcacccagcccagaattttatctataacttctaatctgagcaagactagatagcttttattcttctttgggtgggggtagatttcaatgagaagaaatattgcattaaactctaatttttatttaagttcttgaggtttgkktttttttttttttcaaaattatatcttgtatatttccaaggcagaagastatttggagaagtaaagtctgttgtagctaaagtattctgttgtgtggcagttgaactgatgtgtgcttccctgacatttacttggtaagtagttaattgcttaccaagttagaaataactgtggtatcagtaatacaaatacttgaatttagggaaaggtgagatactatattatgctaggtgaagtattagtggtacttagttattaatgtgggatttgtttagttagaacctaaaacaatattaggacaaacatctgtatgttcaaagatactagtttctttattgctgggtaaaaggtgattataaaaggatcatgacaggttaacacatttggcttcartttcagttttgccagatctaggcargatttatttgggcaacaaacaatacatgtaatcaattataattattcttattaatggtggggaacacagagatgtatattaaaatttyatttaatttcagataaatgtttactgggaaaatttgaaatatatttttatatttagrttggatgcttacttaaaaagcaatgaaagagcatcgtgaagacatgaagatttcttctcctttcaccctatctccccaatcagtttcttccttcattaattgctgtttgagaattataacttggctctaaaacttaaaatagctacttcctctcagatattttctgcattgtgtgtctggttgcctatttgagtttcagagaatttcccttatggaatgcaaagtgaaaggtaaatagtcaattaagtagaaaagttactgtcaacagagatatatgtaaacatagcaaatacgaaagcaaaataatctggctttagctcttagggaaatatttgctattgctaaacctcaatttacatactctacaatgagtgttgattatctgtaatttgtgctctgaccctttaaaatttttacttataaaacttctcatggcatctagttgtattacatttttagtttctgtatctttatcttgtccatcaccaaagaggaattgaggtgaaagtttccagttgatgaatttgtcttccattgcttttaatgttacatgtttgtttagctttcctgcaaagtagtatctgtttatttgtttggagaccacatggcctagtggaccttagcattggatagactttggttggaaatccagtttggtttctactcatattaattagctataaaactaggataatatccagcttatagggttattagtaggattaagtgagatagtataagtaaaatagcatagtaactagtagatagtacacatggatttcagtcatcatcaacttttgaataatctactagattgacacaactaaacttcatcctctgctgtatttcaactttcatataataaatggtgagtgaggtattaagcccagcatctgatgcgctccctcctctcacctcccaccctccaaaaggcccagtgtgtgtttttctccaccaagtgtccatatgtttttatcattcagctcccacttataaatgagaacatgtggtatttggttttctgttgctgtgttagtttgttaaggataatggcctctagctccatccatgtccctgcaaaggacatgagctcattccttcttaaggctgcatagtattccgtggtgtatatgtaccacattttctttatccagtgtatcattaatcggcatttgggttgattccatgtctttgctattgtgaatagtgctgcagtgaacatatgtgtgcatgtatctttataataaaaaaataaaatgatttatattcctttgggtatatacccggtaatgggattgctggcttcaatgatatttctgcctctaggtctttgaggaatccccacactgtcttccacaatggttgaactaatttactcttccaccagcagtgtaaaagcattcctttttctccacaaccttgccagcatctgttgttttttgactttttagtagtagccattctgactggtgtgagatggtacctcattgtggttttgatttgcatttgtctaatgatcactgacattgttttttttttcatgtgtttgttggccgcatgtatgtcttcttttgagaagggtctgttcgtgtcctttgtccactttttaatgtttttttttttcttgtaaatttgagttccttatagatactggatattagacctttgtcagatgtatagattgcaaaaattttctcccattctttagattgtctgtttactctgttgatagattcttttgctgtgcagaagctctttagtttaattggatcccatgtgtcaatttttgcttttgtttcaattgtttttggtgttttcatcatgaaatctttgcctgtgcttatgtcctgattggtaatgccaattctggggttttcatagttttaggttttacatttaagtatttaatccatcttgagttgatttttgtatatggtataaggacagggtccagtttcgattttctatgtatggctagccagttctcacagcaccatttattatacagggaaatctttccctgttgcttgtttttgttaggtttgttgatgatcaagtgttgtaggcatgcagtcttacttctggtttctctaatctgttccattggtctatgtgcctgtttttataccagtgccatgctcttttggttactgtagccctgtagtatagtttgaaatagggtagtgtgatgccaccagctttgttctttttgcttagggttgtcttggttatttgggctcctttttggttccatatgaattttaaaatagttttaaaaaaattctgtgaagaacgtcagtggtagtttgatgggattagcactgaatctataaattgcatcagacagtatggacattttcatgatactgattctttctatccatgagcatggaatatttttccatttgtttgtgtcatctctgatttctttgaacagtggtttgtagatctccttgaagaggtcctttacttcctttgttagctgtattcctaggaattttattctttttgtggcaattgtaaatgggattgccttcttgatttggctgttggcttggctattgttggtgtataggaatgctatttatttatttatttatttatttatttattttttttgagacggagtttcgctctgtcgcccaggctggagtgcagtggcgcgatctcgactcactgcaagctccgcctcccgggttcacgccattctcctgcctcagcctcccgtgtagctgggactacaggcgcgcgccaccatgcccggctaatttttgtatttttagtagagacggggtttcaccatgttagccaggatggtctcgatctcctgacctcgtgatccgcccgtctcggcctcccaaagtgctgggattacaggcgtgagccaccgcgcccggccttatttatttattttttgagacagagtcttgctctgtcgcccaggctggactgcagtggcgcgatctcagctcactacaacctccacctcccaggttcaagtgatcttcctgcctcagcccactgagtagctgggattacaggtgtgtgccaccatgtccggctaatttttgtatttttagcagagacggggtttcgccgtgttgggcagtcatgaactcctgacctgaggtggttcacctgcctcagcctcccaaattgctggtattacaggtatgagccacctcactcagctggaatgctagtgatttttgcatgttagtttagtatcttgagactttgctgaagttgcttatcagcttaagaagcttttgggctgagacaatggggttttctagatataggatgatgtcatctgtaaacaaagatagtttgactttctctcctcctatttgaatactctttatttttttctcttgcctgattgccttagcaggaactttcaagactatgttgaataggggtggtgagaaagggcaagcttgtcttgtgcgggttttcagggggaatgtttccagcttttgcccattcagtatgatattggctgtgggtttgtcatatatggctcttattattttgaggtatgttccttcaayacccagtttattgagagtttttaacatgaagggatgttgaattttattgaaggctttttctgcatctattgagataatcatgtggtttttatctttagttctgtttatgtgatgaatcacatttattgatttgtgtatgttgaaccaaccttgcatcctggakatgaagccaagttgatcgtggtggataagctttttgatgtgctgctggattcggtttacaagtattttgttgaggatttttgcatcagtgttcatcaaggatattggcctgatgttttccttttttttgttgtatctccgccagattttggtataaggatgatgctgacccttcctctgttgcccagtctagagggtagtggtgtgatcatagttcactgtagccttaaactcctgggctcaagagatcttcccgcctcagcctttttttttttttttttaaagtagctgtgtgtaatggtgtgtgtctgtagtcctatctcagctgggactactaggtactcaccatcacacccagctaattaaaaaaaattttttttagtttgggtataatggtttatgcctgtaatcttagcctattgggaggccaaggtgggagaatcacttgattctagggatttgagactaggctgggtaacatagtaagaccgtgtctctataaaaaatttaaaaaatggccaggcatggtggctcacatctgtaattctaacactttgagagggcaagggagtaggatcccttgagcccaggagttcaagaccagcctgagcaacatagggagatcccatctctataagaaaaaatataatattaaaacaatttaagaataattagctgggcatggtggtttgtgcctgtagtcccaattactcagaaagttcaattactcagtgakccgtgatcataccattgcattccagcctgggtgaacaaacaagaccctgttagagatgggggtctcacttagtcgcccaggctagtctcaaactcctggcctcaagcgatccaaccrcctcagcctcccaagtagctgggaytacagatgccaactcccatgcctggccatttgtatattttaaccattctaattgtcatgtagtggtatgtcattgaggtttccattatggtttcaaaccctgatgactaaggaggttgagcatcttttaatacattttttggctctttgagttttctcatttgtaaagtgcctgttaatgtcttttgctaatttttctattggattgactcttttttttgttatttctgttctggctgttcttggccctttgcatgttcatgtacattttagaaccagaacgtccacacacagaggcatacacaaaagctattacgattttatttgggattgtattgaatctataggttaatttgaagagatttgaaacatttacaatattaagttttctggttgatgtttagggtatctctgttaattaatttttctccagtttctctaagattttatatttttgttggtgaaggccttgcacatattttgttagatttattcctagatccttgatagttttaattctgttgtaaattgtagcttaaaaaattcccttactgaattttgttgctggcatatagaaatacaattagtttttctatattttttattttttgagaccgagtctcgccttgtcgcccaggctggagtgcagtggcacaatctggctcaccgcaacctccaccttccaggttcaagcaattcttcttccccaccctcctgagtagctgggattacaggcgtgcaccaccatgcccagctaatttttttttttttttttggtatctttagtagagatggggtttcaccatgttggccaggctggtctcaaactcctgacctcatgatccacccgcctcagcctcctgaagtgctgggattacaggtgtgagtcaccgcaccctgccggtttttctatatttgaatccagaaacctgactcaattaggccaatagttttaataatttgtcgtggatacttctggattttctaagtatactaaatcatataatctgcaaatagagttttagttcttctttttcaatcttgatacttttttgttcttacctatattgtttttattcatggagtctcatttcctggtgtgctttgttactgttgtatgctggagattgtgtttcgaaagttatktgtggactatattgaagcttaggaggattatatctttctggaagggttttcatttgttttttttttttcattggcctggggtcattgctggtccaggctaattttaatttaaatctgggatctgagatctcagaatcactagataagttgaaaatgggttgtagatccatrtgaaggctgataaggttctggttcatcctcaagtaattgttcacagctacaggaatttcaggggtttcttcctgactccattgagttttaaatttctgtgcctaaattttttttgtctatttctagaaatttttttttctttttcctctttttccttatataggcctaatcatctctgaaatgtcatttcttacattcatctaaacgtgtgtttggaacctgtttaataaaacacaggtttcatttattgatataaaacaacacatcacaaaggttttgtgcacgctgcttgattttaggtcttagggctggatgtttgtatgttcctgtaagggctcaatgggctcagaaatgtcatttcttagattctacaaactgtgtgtttggaacctttttaatgaaaacccaggttccattcagtgatgtaaaacagcacatcagaaagctttttcttcttcttcttcttttttttttttttgataatggtttgctgtgtcacccagactggagtgcagtaatgtgatcatggcttactgcagcctctaactcctgggctcaagcaatcctcccaccttagcctcccaagtagctgagataacaagtgtataccaccatacctggctaatgttttaatttttttttttgtagagatggggtctcaccgtgttgcccaggctggtctcaaactcctggattcaagtgatcctcccgccttggcctccaaaagtgctgggattatagacgtgagccaccgtgcccagccttttgcttttaaaaaaaaaatcactttttatagtttccacttcatacagattgtgcttgtcttttatttctgtacacatggtagcatagttattatctgtaaactttgtgaattcttccctgttgtttttgttcgtgaagtatagtttttttctataccttgttataaaatacaacgtgcttgacattgtatttggaaatttatttgtaggaatactttgaggtgtaatgtgaaggttcctccagagaggatttgagtttgcttttgcgaggtgcctgggcatttgaatcaggtaccgccttaaaacaagttcaaggcttgggattccctgatatcctacatcatttgagcaggaaggtctctcgtcagatatcccactttgtgtgggcctgactttgtatattaactttctgtgctgtaaagatgttttaaaaattttatcagtgttttgttttgttttgttttctctaggaggttgacccaaataatatagcctgttttactgaaacagcaagttctactgcagtttgtttaactagatacatgttggacatttagtttttttctttattattataaataacactgtaataaagaaacgtttttatttgtgtgcttgtcctgttatttacttgtgattaatctgaaaataaaatagttacaatctgcatttttaaaggctatttgatatgtattatcaaagtatggtacacaaagattgtcctaacactgtgtattctaaatctttttaacttttaccattttgatagatggaaaatagtacacattattattttaatttagcatttattatttttacttatataactattggctgttcatgttttactacttttgggttatgaaagcttacatactgccaactaggggcttactgaggctaactcacacatcagatgatgtaaatatttccctcagtttgtcacttatatttcatcttcatttacaaaaatatatatatgttttggtatagaagtttaacgcttgtactaatcagatctatcaattttttataaagccataatcagtctgagataataaatttatagttgttcctagaaaaactagtgttttaagtttggaattgtcttatgtggctagaaaattgagaaatagtcaaaccactctaacctcaattaggatattttaatatattaacataactcaaattaggataatgctaatttttagtctatgttaacctgagtttttatgataagttttttcctttttctcattaaaatattttctctttgtctgctactgttcttttgatgtataccttcagaaattggcagggttgaaatctgaaagaatattcaatgtaggtttttttctgtattttgccttcactaatgatagtgattcagatatcatgttagaaatgatttgagatatcaaggttttaaaatttttaataaaagtaaacagtattcattaaaacaggaaatcattttattgaaactgaatgaggacttcaaatttttgtaacagcttaaaatatgtttttttagataagtgatgaagagaagactcttcgagaacaggagattgttgcctcatcaccaagtttaagtggacttaagttggggttcragtccatttataaggtatgtaaacatgtaaaatacttcctaggttttgttaaatatgtcgcattgagctttatatacatatttaattaatccatttttatagcctctcatcatcacagctactctgtctcctgcacagatactgtcctcattgcactaatggtgtgccaatgttctctcctgggctgtctccttccacggacgcattcccaaccctgcttgggctctgacctcccattacaggctgttttcctaatggaataccctccttgcattgtttgggttcttacaccctgcactgggctatcccctgccaggaaaccctcatcacccatttggcccaacactctgtttggattgctgccttgcgtggaagccccctttcgcttctcttgacctctgacatcgtggtgtcttgcctcatggtctctctgtgattccactgggctctgacattgtaagcctacgttttttcctatgggaatgccctccttaacctactcagattccatcatcctgtgcttggccacctcagtttcccctccccactcagttcagataactacgtcacatgaacccttccagaaggggaagagggaagagtttaaattcattttacaatttgataactgcaaccccacaatttcctttgaaaagaatgtgctaattattatgagtgagtgccagtagtttaaagtcctgccccattccagcttcttcgtttcgactgttgggccatcattcagtcagcctttcaagcctagagtgtggtgatcaatatttatttctcttacaccacacatttccagttactctgccttcacatcatcttttgcttctacttgggcatttttgtttccactgtgaccaccttaataagctagaatcatgaaatattatggctaaagaatccctaagggtcagttagcctatctcttcctcccctctctcagctttacagatctggctgctgagatttagaggcattcattaaattcaccaaataagtctagtcagtatcagagcttggactagaactcatgtttcttccctatattattgcagtaaaccctcttacctgctcatctaatatgtcctatgtaagctacctatttggtgcagtatcacacaattctaccctgtagggctgtttgactttccggtgtgtgcccatgagggcagggactg

SEQ ID NO: 93647 - DNA, 12552 bp, Homo sapiens
acaaattttattgttttggtttgcttttatctcatattcttacatattttcctctattattaaatatgttttaaaattgtaagtctgaatgactttacagtgttttactatatagatatcataatataattaatccaaattttaggacaattaaagctatactacactttgtcattgctaaagctaccttagctaatgtaagtgaagcactcataatactagtaacttataacaatggacacgataatagctataaatgtgtttgttgttactacttaaaacaaatatcacatttaatttgctggcacagaatggcttgataaaatacatacatcagtttatactattttcaatgtttcaaaggaaaccagattcacatcagaataaactagccaagtactgattttgggggagacaaatatgaaattagggttattccctcaaattacctctttttgttgtcgttccagttctctcatgcgtatatctcttgcttctgcccgggcagcccgttttgctgccagccttgcctctgcctgaaaagtaatataaaactcagctttatacaacaaaaacaaaaacaacctgtacaccagatttgaaaataaagaatgggacattaccacgcaaaaggggtgggcaggagaagatattatctatcagcaagcaagtttgattgattgttttaatcaactcttataaactcatttctttctctagttcctaagtctttcctcaaatccgggcctttacctttaacttcttgtttgattacacactcaacacatttcatacagtttgttatatgcctctccaaacttactctttttccagaattttttccccattgattcaatcatataaactagaaacttcagagccaacctctctttcattttggacactgccaataatcagtctccaagtactgacaattctctaccactgagtctctatcaaacccatctcagctttctttattctcactgttcctgctcatttcaggaactcttcatctccccactccccacctctgttttaaaattgagacagaattcacatatcatcaaattcactatttaaatgtatacaattccgactggatgcagtggctcaggcctgtaatcccagcactttgggaggccaaggcaggaggatcatatgaggccaagagtttgagaccagcttaggcaacatgatgaaaccctgtctctactaaaaataaaaaaaatagccaggtgtggtggtgcacacttgtaatcccagctacttgggtggctgagacaggaaaattactcgaacctggaaggtggaggctgcagtgagctgagatcatgccactgcactgcagcctagatgacagagtgagacgctgtctcaaaaataaataaataaatgtatacaattctgtggtttttagtatactcacaggatgtgcaatcatcatgactaattccagaacattctcacaccccaaaatgaaacctggtacccattagtagtcattccccattaaccctttctcccagctcctggcaaccactaatctactttctgtgtccatgcattcgcctattctggacatttcatatacatggaatcataccataggaattcttcatctcttgcttacagttacctccaaatccatctgcctacttccagaatctgccttataatttatcttctacatggttatatgatggacaaatcagcctttcaaaatgtattatttctgatcacatcattccactgcataaaatcctccaccaactccttattacttatggttaaagcaaaaattccacagaacagcacaaagggaggaacagaaagaagaaaggtaaaactgaaataaggctcctcacagtcaggtccccaccttacttccaagtccagtagttccccccttatctgttgtttcagttacccatggttaaccaaggtacaaaaatattaagtggaaaattccagaaataaacaattcataagttttaaattgtacgccattctgagtagtatgataaaatctctcaggacgtcaatcatccctttgtcgagtatatccatcctgtctatgctacccatttgttagctgtctcagttatcaaatcacagtgattgtgttggagtaatcctcattttatttaataatggccccaaagagcaagagtaattctgacaattcaggtatgccaaagagaagccacacagtgcttcctttaagtgaaaaggtgaacgttctaccttaatagaaaaaagaatcatgcactgaggttgctaagatctatggtaagaacaaatcttctatccatgaaattgtgaagaaggaaaaagaaatttgtgctagttttgctgccgcacctcaaacggcaaaagttacagccacagtgcatgatagttaagatggaaaaggcattacatttgtaggtggaaaacatgaatagaaatgtgttctgattgatggcaatcaggtttgctactatccacagtttcaggcatctgctggggggcttggaatgtatctcccatggattggaggggtggggactactctacttgctccacgtgtactgggtgcatcccatctctctccattcctggactctattgtgttctgttacgcctctcttcacaaactgtttggcaggagctgttctcctttctcttattcagtaaaatattaccttctatgaagattctccccagtccctctttcataaagtaaggctctatacccatgtctctattgcggctttattatgttgtattaaaattccatgcttctctcaccccacaacttttatgcctcaaggtctgctaaaaaaaaacaaatgaattgcagggcataggtcacagtatcaaggaaatgagataaggaaatagcttaatgtgccacatgaaacttagaaatcttctgtctgctttctatatggtagtggaatggtttcctctgtccttggtcacatcctaactctgattcagactatcccctctgataactatagttgttgtcttcccatgttgttatattcgtgcccaagtctcatagtaagaataaactcaaccaatgtttaaaaggatctactacattaagcaattatgctaggtgctgaaaatacagagtaaagtatgacatctctgccctaaagcagctcacaaagttgaagaatacagagacacaatgcttatgggaaggaagcatgtaggagggagaaattagttttgcctggcaaagtcacagcaggcttctaagaagcagagagagttaaatagttaactgctactcaactattccaattgtggcaatttcccagtctgtgtaactggtcttttaatagaaaaacccctgcaaagtaaattgtaatctaccaaccgtaagctgtaaccactaacaatctagagaaattagttttctcccatgaattttacactggcctccgtcttttcaaaacctatgctctgcttcaagttatctgccttcttcacccctctatgagtagacactagtttcttattagagttttttttttttaataggaaacacttcaaggcttttaagcttaagtagatagcaaatgtattttaaaatcacaaagcatcaaaactttcaaacctttttaagaaagccctatcaatgtgtaggaattttcatttacatgtatattaaattgtacctgaagcctcctttagaaatttaattcaagaatgctaattttatccttctaagatttgtctgtggccaattctgtacaatctatatatactaaaatgagacttccttcataaaacccaacttagagataattaaaatctattctttaataagacatttttaactacaaaaaggaaaggaacagaaagaacatgggcttcagagacacacaaacacccttccctttgttacttagccaactcagatgttacctcccttggagactgtgttgaagagaggccattaaaaccacatgctttaaaagaaataaacaggatttaaaactactttatctggttctttctatacattattactagatgcttgaagcaacatggataagcaggagtagcaaggagccaacactgattccaacctagtagacgaaatatatgctctataacttattgtgatatattttaaaattatttttgaatagacaattatgggtacataaaacatacttctaggtagttaacactagcatttttacctcagaatacaatcagataaagagctgctacagattcattttaatatacacctcatacatacaaaataaatgggatataacaataaaggacaaccaagatttaactaaattcacagtaaaggctgggcgtggtggctcacgcctgtaatctcagcactttaggaggacaaggcgggcagatcacttgagaccaggagttcaagaccagcctggtcaacatggcgaaatcccgtctctactaaaaatggaaaaaattagctgggcgtggtggtgcatgcctgtaatcccagctactccagaggctgaggcatgagaatcacttgaaccctggaggcagaggttacagtgagccaagattgcaccactgcactccagcctgggcaacagagtgaaactctgtctcagaaaacaaacaaacaaaacaaaataaagttggctaaaacacacaattaccatttgatccaataattccacctatgggtacatatacaaaagaactggaaagcagagacaacatatatttatataccaatgttcatagcagcattattcacaacagtcaaaatgcagaaacaacccaaatatctatcaatggacgaatggatagacaaattatggtatacacatactttggatcattcagccttaaaaagaaaattttgatacatgctgcaacatggatgaatcttgaagacattatactaaatgaaataagccagacagaaaggagtaatattgtatacttccacttaatgagaaacctaaaatagtcaaattcatacagacagaaagcacaatagtggttgccagggactgagggtagggggaaatgggactcactatttaatgagtacagagttccagtactggatgatgacagagttcttaaggatagtggtgatggctgcatgacaatgcaaatggatgtaatgccactaaactatatacttaaatatagttaccatgataaatttcatgttacatatattttaccaaaagaagttggctaatttaaaagtcagaataagatataaattagaagtattcagaagcctaaattatttaaatacttttagagtctttcggctgatatgaccccaactgttataataaagttaatataaaaattcagaaaaattcagaaaaattcaggagttcaacaccagcctggccaatatggtgaaaccccatctctactaaaaatacaaaaattagccaggcatggtagcgcttgcctgtagtcccagctacttgggaggctgaggcagaagaatcgcttgaacctgggagacgaaggttgcagtgagccgagatggcaccactgcactctagcctgggcagcagagcaagactctgtctcaaaaaaaaaaaaaaaaagacagtgaaaatcatgggctttgatcactcccagaacaaatgcattaggttgtatttaaactcacagaacttttaaatttgtagaatattcactgtatcactcaatgaataattaggaatcacataatggacactaagaaagaacttctcggcctggcggtggcctgctccagttcgagccggtacctcactgcatctcgcaagaatttgtggatttgggggtggaaccccattcggaagagcacaaaaaactgctcttaagtcattgcaaagctacagctctggttagccagccacaaagttgtcatgagagtcgtctccacaataccaagagcttgtgtctggcagagccggtatgagatgagacaatgctgtcccacctccgggataaccaggagttttggccagacttttgagcacataccgrgagagtgaggagccagatgacaagcacatactatggcactaagacagattaataaggaacttagtgatttggcccatgaccctccagcacaatgttctgcaggtccagttgaggatggtatgtttcattggcaagccacaattatgggacctaatgacagcccatatcaaagcggtgtattctttttggcaattcattttcctacagactgctccttcaaaccacctaaggttgcrtgtacaacaaggatttgtcatccaaatattaacagtaatggcagcatttgtctcgatattctaagatcacagtggttgcctgctttaaaactatttctaaagttcttttatccatttgttcactgctatgtgatccaaacccagatgaccccctagtgccagagagcacacggatccataaaatagacagacgtaaaagtacaacagaatatctcgggaatggactcagaagaatgccatatgatgctaccttaaagtcagaataacctgcattatagctggaataaactttaaattactgtttaaaaaaaaaaaaaggctgggcacgttggctcacacctgtaatcctagcactttgggagtccaaggcgggctgatcactaggtcaggagttcaagaccagcctggccaatatggtgaaatcctgtctctactaaaaatacacaaattagctgggcatggtggcgtgaacctgtaatcccagctactcgcgagcctgaggcaggggaatcgcttcacccaggaggcggaggctgcagtgagccgagattatgccactgcactccagcctgggcaacagagcaagactcagtctcaaaaaaaaaaaaaaagaacttccaggaaaagagaactaaacatgtactatggtttatgtatttctacattagatacttcctttaccatcataattttgtattatgttcttttggaatttgagaaaagtagatgagatacaataaaaatataaataattttaaaatgagcaaaggatttaaatagacatttctccaaagaagatataaaaatgaccaataagtacataaaaagatgctcaacatcattagtcattaaagaaatgtaaattaaaaccatattgagatacttgatatccactaggattgctatgataaaaaatgtttttcaactgaaaataactaaaattggcaaggatgtggagaaattagaaccctcatatattacaggggtaaatgtaaaatggcacaattgctgtgtgaactgctgaggcagttcctcaaaagttaaacacagtgataccatccatccacctctaaatatgtacctaagagaaacgagaacatatatccacacaaaaacctgtaaatgaatgttcatagcagcattattgacaatagccaaaaagtagaaataacccaaatatccatcaactgatgaacgaataaaccagcgagattatccatacaatggaatattattcagccttaaaaagaaatcgaacactgatacaggatgcaacatgaatgaaccttgaaaacattttgctaagtcaaagaagccagacacaaaaggtcacatattgcatgattcaatttatatgaaatgtccagaataggcaaaaacataaagacagaaagtagattactggttgccaggggctggggaaggggaagatgaggagtgactgctaagtggtatgaggtttctttttgggctgatgaaatgttatgcaattaggtaggtgacagttgcacatctttgtgaatatattaaaaactactgaatatttttaaatggtgaatagttttgatggtatgtgaattatatctcaatttaaattttttaaatagatgagactgaatgcatcaaaaatgcctaagctaaataaatactaaaatatataaaattctaatacataaaacttaatatataaaatgggataaaggggagcttataacctattaataacaagtttggaaaatgctaagttaaacattttttaaaatcagagtccttaataatatgcattatgaatctcaaagaagaggatagaatatatagtatttctcagacttgaccacattactaaataaaccctaaatgatacttcaagggtcatgctccaagaaacacagtttgggaaataatgattaagtaatatatcaggatccaattacaactgtactaaatcttacctttgctcttgatacttataaaattaaactaaattatctgaataatcacctcacaatagaaaacccaaactattcagataatatatctaccatggtttgaccacttacttagcaaggatagatccttattttctttcttttttgggggggtggggggggaggcgttctcattgttcccctcccacttttccccgcgaacatgcagtgccgggttttctgttcctgtgttagtctgttgaggataatggcttccagctccatccatgtccctgcaaaggatatgatatagttcctttttatggctgcacaatattccgtggtgtatatgtaccacattttctttatccagtctatcactgatgggcatttgagttgatgtaactcaaatgtaacccaaaactataaaaaccctagaagaaaatctaggcaatgtcattaaggacataagcacaggcaaaaaatttcatgttcaaaagcaatcgcaacaaaagtaagaattgacaaatgggatctaattaaactaaagagcttctgtaaggcaaaagaaactatcatcagagtgaacagacaagctacaaaatgggagaaaatttttgcaatctatccatttgacaaaggtctaatatccagaatctacaaggaacttaaagaaatttacaagaaaaaaaaaactccattaaaaagtgggcaaaggacatgaacagacacttctcaaaagaagcaatgtatgcagccaacaaacatgaaaaaaagctcaacatcactgattagagaaatgcaaatcaaaaccacaatgagaaaccatctcacgccagtcagaatggtgattattaaaaagtcaagaaacaacagatgctgacgaggctgtggagaaacaggagcacttctacactgttggtgagaatgttagttagttcaaccattgtagaagacagtgtggtgattcctcaaagacctagaaccagaaataccatttgacccagcaatcccattacttgaaggaatataaatcattctattataaaaatacctgcacatgtacgttcactggagcactattcacaacagcaaagacatggaatcaacccaaacgctctcattgatttttaatgtatttttgttatagtaatatcacaatttcttatcaggttttaggtaataactttcctttgctacaaatagcctcctacagcatttgacttctaattcaaaagctaactgagcagcttccaaaaggaaaatcataacaatgagctggatcaaaaaagtgtgtaatgtgtcaaaaggaaatacactattcctaaataagttatttactaataacaaagaggaagtgatatggtaataattctcaccaaaagaatataatttaatgatgctctaagcaattcttataccatattagtttgtggtcagtctgcagttgcagatagagtctgaaacaaagttggcaattaagtaagaaatcccagctggcagtcatcttaaatttccaatatacggcaggaaatgttgccagcgattcaataggtgacgccccttccctttttcttttttctgagttacaacaaactgaaacaaaattgccccagaagttctgttaccagctaacagaattaaacataaaaattccactgcaatgtttcaaaaaataaaacactgaatctgaaccgacatgaaatattgtttccatcaacatttacataccacgtctgaagcatattaactgcatagcccaatgagtatttctataatatagtcatcatatcttcaacattctaattatcctaagtttacattcgaaagattaattataaacttcaatacattataacaagtacatggaactcaagtaacccataaaaatataaagaaaaattaattttggatgcattggatattgtgaaaattgattatataaattggaattatcttgtcatacccaattaaattacagtcatgagatgagggaggaagaaaaggaaaagaaaagcacttagggcacaagcacctgcccagggattatctggcaagccagctgctgaaatgacctgctataaccttaagatcagttttacctagtagctgcggaaacgaactgctataactctaagactagttttacctaccacagtcactcacaaatcagagcatgccagctcccaaaaacttcgctagtgccaatgcattttctttcaaaacaatgcataacatttctctaataaaaacctcaatcttttctttgttctttggacataccaaagaccaatgcagtctgtgtgtatgcccaaattacaattctactgtctcaaataaaatgtgttgttcagagattcatctctatatttgatttctgttgataatatccaactatattttattctaacacactattttagagactagctataacatcttgctcataataaacatctgaaactagttcaatgagtaaacgtctatatctctgtcaaatcggcatttttacaatacatctgtgcaactcagtgttgagaggggatttaccaaacatacctctctggcaatgttactcaaagcttcatcttctgcagaaaatcggtctttcacaggtgttcttttccttccagaagcaggagtccccatcttgtgttcttaatagtcttttaactttgaaagtgatttaactgtgttttcagccctgaagtaaacaaaaacataataacttaaggtatttctttgtgcaattttcatgctcatttatatattcacttttaacagagaaattagtcaccaaatacctcttcccactaccaaattattccaataaattttagaatatttaattttatactaattactaaaactcctacttcttttcactatgctacccacagcaatctgtgtgtattataatattagcctcagaaagctgccatcagcagaaattctacttaaccatttaaaattactatagctgggcagcctggccaacatggtgaaaccctgtctctatcaaaaatacaaaaattagccgagcagggtggtgcatgtctgtaatcccagctactctagaggctgaggcaggaaaatcacttgaacctaggaggcggaggttgtagtgagccaagattgcgccacagcactccagcttgggagacggagcaagactctgtctcaaaataaataaataaataaataaataactatagttatttctaaaaccaatttccatcccagaatgaaaaacatttcagaagttattcagcctaaacttttagaagaaaatgttcaagaggttttactactaagccttatagttacaaaagtaactttgctttttagtgtaatttaagaaaaattccaattaaaccatgacaacgtcaggcacggtggctctcacctgtaatcccagcacttggggaggctgaggtgggcagatcacttgaagccaggagttcgagaccagcctggccaacatggtaaaaccccatctccactaaaaattcaaaaattagccaggcatggtggcgcatgcctataatcccagctactatggtggctgaggcacaagagtcacctaaacccaggagatggaggttgcagtcagccaagatcacgccactggactccagcctgggtgacagagagagactccacctcaaaaaaaaacaaaaacaaacagacaaaaaaaacccacaaccatataaaagaaaaaatgaaggtttattactctgcaattaacaataaccaacactgtccatgttgttaccaggtactataggaggtgctaaaggtacggtgatgaagaaaactgatatagtcaaatgattaagaatatatcgccaggcgcggtggctcacgcctgtaatcccagcactttggaaggccaaagcaggtggatcacctgggatcaggagttcaagaccagcctgaccaacatggtgaaaccccatctctactaaaaatacaaaattagcaggacatggtggtgcatgcctgtaatcccagctacttgggaggctggggcaggagaatcgcttgaacctgggagacagaggtttcagtgagccgaggttgcaccactgcactccagcctgggcaacaagagagaaactccttctcgaaatataaaaaaaagaatatatctatgaacctgttactattacttattagacctattttaacaaaaggaagaagaaaaacccatccaccaggattaaataataaggatgaaaaagaccatctaacctttggttagatggtatttgagattaaagattaccatgaaagaatgcaacccaaatttcatgccctcttttcttctatacacattgctaagaagtatagctcatttagctaaatattccata

SEQ ID NO: 93648 - DNA, 92218 bp, Homo sapiens
gcatcacttccagctcaagtgtcctagtcaatgccctttgttttggcaaagaaggattccagtaccttctctttactgccgcattcatttcaaccttctctgcaggctgtgttagaggccacagcccttggcatccaattgcagcactctgggcattggggattttctttgccacctctgggctctgttttgtcagcagtttctgctctggagttcccctactctgtgaaattctgaacattgcactaacgcagagacccagggcgccacagaagcagaaatggctactctagctccccaaaggggaacatgaaaccaagagcagcagtgggctagtcagggagggaacacgttccgggcagatgctgaggaactgagagcagcacagccgcccgaggcactggagttatgtctgcatctccccagccccacttccctgcagtttggatgatgcaaacatgtgcaaagggctggctgggtgcctccactcatacctccctccctgcattcagtcctgcttgagcccccagccttgtcaggccctctgtaaggataaggaatgagtaagacttttttgtttgtttttgagaaggaatctcgccctttcacccaagctggagtgcagtggcgcaatctcggctcactgcaacctccgtttcccaggttcaagtgattttccagcctcagcctcctgagtagctgggattacaggcgtcccctaccacgcccagctagtttttgtatttttagtagagatggggtttctccatgttggccaggatggtctcgaactcctgatctcaggtgatccgcccacttcagcctcccaggtgttgggattacaggcatgagctactgcgcctggtcaggaatgagtaagacttttgaaagagtttttcttccctgtgagctcaaaccttgaatggaagaaaaatcacactcacctagttatggtgtcggtgaggattgtattgtgtaggtggtttactgcgatgaatgggatcacacagggatgtacgaagaataatgggaggatggagtaaaggacagtttcagaaattgagaaaaaattactagagacaccttgtatgacttcgaccttcattttaggattgggtgctgtctccgtgttctaccaggcttgctgatacacagcagttttgttagtggaggcggagcttaaaatctaggcagctacagccccgcagagaataataagctgttaataataacattaggtcttcctggagtttcaggggcttggagaaggggaggctgccaagaaggaaggcccggcaaagtgatattcctgactgggtgtggtggctcacgcctgtaatcccagaactttgggaggccgaggcaggcagatcctgaggtcaggagtttgagaccagcctggccaatatggtgaaacccccatctctactaataatacaaaaagtacctgggcgtggccgggcgcggtggctcacgcctgtaatcccagcactttggggggctgaggtgggtggatcacgaggtcaggagatcgagaccatcctggcaaacacggtgaaaccctgtctctactaaaaaatacaaaaaattagccgggcgtggtggtaggcacctgtagtcccagctactcagaggctgaggcaggagaatggcatgaacccagaaggcggagcttgcagtgagccgagattgcgccactgcactacagcctggggcaacagagcaagactgtctcaaaaaaaaaaaaaaaaaaaaattacctgggcgtggtggtgggcacctgtaatcccagctactcgggaggctgaggcaggagaatcacttgaacctgggaggcagaggttgcagtgagcaaagatcatgcaactgcactccagcctgggcgacagagtgagactccacctcaaaaaaaaaaaaaaaaaaaaagtgatagtcctaagggaaaggcttgcttgcattggggattttttttttttttgacattaaaactcaccttggtggaagaacctttgtcctcrtcatagcaatgatggcacttatttatgcacaaaatgttaagggcacctgccagagacaaggcagtgtgctggtagctgggagaagagggggctttttgcttctaggagtcaaggcctgatggaagaaatgtgcaagtcattatagagtgatggtgttatagcagagctgaacacaggaaggagtgcttaaggctgtgggggtaggatggggaaaacttcatagacatggtaacatttcagttgtttcagagggaaggaggggaaaagaacggcttagggcaagatgtagattagggagggcacactgttttcaggggcagtgagaagtttgctctgacactgtgtgcgtgcacccattgagcatggggacagagtaggtgtccagggaggggagttgaagctgcggaaaagacagggatcagactctgatacagcacctggttaaaatgcattcttcccactcatggatctgctcaggcagatcctcccttcctgcacaccatgcagaatgcccgggatgttaccatttcactaaaccattgtctaatttagttactgcatctggctcttttatggtgctgggagaaaagtatgggaaagtggaggtttgggaaggggctgtgattgcggaacaggcaattttacattgctttctcatgtttggcatgaatttaatgtttaaaaattcagaaaagtcatgcctgacaaagggtacgaatattagattcacaaataataattcataattttacaggaaattttcattgagtgtttttctacagaaagtataagaaacatttatttatttatttagacaaggtctcactctgtcacccaagctggagtgcagtggcacgatcatggcttattacagcctcagcctcccagcctcaactgatctttctgcctcagccccaaccttcccctgcccccagtagctgggaccacaggtgcccaccaccacactcagctaatttattttgtttgtttttgtttttttgagatggagtttcgctcttgttgcccaggctgaagtgcagtggcgctatcttggctcactgcaacctccgcctcccggattcaagtgattctcctgcctcagcctcccgaatggctgggattaccggccccagccaccatgcccgtctgatttttgcatttttagtgcagacggggtttcaccatgttggccagcctagtctctaatatttgtattttttgtagagacggggtttctccatgttgctgaggctggtctccaactcttgggctcaactgatctgcctgccttggcatcccaaagtgcgggattacaggtgtgagccactgtgcccagcctctcatttatttttacaaggatctctgaagtaaaagtgtgaggcctgtttacctgtggttttttgttttttttttcaccttcatcagtgcaaagcaggtggaagattctcctcggcccttttttacttttcctcattgcgctgaatggtaaatatggtaagaaatgcaggttgcagacagttctcttcctcggtcaatttaaaccatttgtttggtatcttttatgtgccaaatactctcttaggctctagtcagaacagacaaatcagtttataccttacatttttggatatttacgagtggaaacgtcagttattatggactaagaacctcatagcaatggctatacaattgaagccaatgagacagacacaagctcttggaagcttttattacaaaacaaacgattctatggtaaactggtaaataacaagatatatttaaacccattacgctcaaacaacggggacgggggtagggaatacaacaagaatacaaacaatataattataggttactttgttttaaattaatttgagtctckttatttactcccttgccaagtagtttttttgtgagctaataggacactcctctccactgccctgtcctccgcaaagctgggactgactgttggtttttcacaagtagagagaggccaagtagaaaggcgtattttaagctttctcagactcgtgactttaaccattaccggttgacagcaatacttgccgacatcatctcaccttgcttgcggcatatcagattgctggagggggaagtgcttcactttctctttcagatgcacagctaaattgaacttggatgaattaaccatcggtgaaactttgtgcgtgccctacggctactttctgggacttcagatttttagagatataggagtgaaaaggagaattttacaccttctctgagtctggaaggacagacattcccctaaagtggctaaggtggtgaagggcagaaagattggaagtcaggcccacagcagctcgaattattccgtatttatctagctaagctttgctgagcaggtgtgagccaattacatactctttcttccyccaccccccagcccatgattacgtagggattctatgtatccttcgacctcaagcagagaagcccgagcgctacgagggctggtccagatgttttagttattgtacctgccagggcaacctcccacgggggttggcctcggtagattcctgaggatcaactggatcagcgtttttctttcccacggaccctgaagttagagcatcccagcatggcttggacaggcaaagctaaggggtcccaggcctgctcaattgctaggaccacgaaggggccttgagtgccgtttgaagtgacaaggctctgcctgggcagtcaggacactcttgattttaactccgattcagtaggttttccccaagactcagtttccctttcctgtgggatataaactcttcctttcttgctcctccacagctcatctcctcctctccgccccacggtgcggtgtgggtcccatccactggcactgtaaaccctcaggaccccggggcgctgggatcgcagcagctgcccccgacagcgctgcaggcaccagcgaaatgcgctgcgcccccacgcacccctcagggagccgaggtgggcgtgactgtaaagcgggcgcacagagcgcagatcgcgccacatcggcctcggcgggctgcggctgctccccattcctccgccctactaagttcctcgcggccggaaggcacaaaaggatgtttcagggcggggtttcccataccccgcagccttccccggatgcctccttcccggctcggagttggaagggtttcctcagggctctcatttcctgcagcccggcgcctccacgcgggccagatcccgtctctgcagcctccccccggcccgcgcccattccccgcccccaggagccgggcccggacgctcccgggaagcagccgccctctccggggcccgggcgtggccgggccctccccgccgggttcccgcccgccgccgttccagtcctcagccgcgccagggcgggggccaggcgagttcagcgccagcaacggcgggggaggagggcccgggagccctcccgggctgcgcggcgccggccggcggtgcagtcgcgcgctcgccgccagcgaagccattggctcggcgcagtcaccccacgcggggctgccgcggcggcctccgcggattggcgcgcaggcgggcagggaccggggcgcgcgcaggcgagtgcgtgcggccccgaagccccgccgtctcggggtcccgcccytccccccggccgcgacgaccacccctccattgtccccgcgtggcccaggccgcgcctggggccgccgccaaacccggtccccaccgccccggcccgaagaaagcgcgcgaaaggcgcgctcccagcgcgggcgctcgcgccgcctgcygcccccggccgttcactgccgcatttcgcgctctcgcgccgcgccccgccccaccggcctaaatttgcatatcccaggatcgcggccaatcgctgctcgtctctctcgaagcggatggcttttgcctgagaggaaagggagtggctggcggcgcatgcgccacggtggccgacttgaaccgaggcttttattgctgtagtttatttccacccccttccctcctgtttctctctctccttctctctctctctctctctctctcttttttttccgccctagctggggctgtgttggaggagaggaagaaagagagacagaggattgcattcatccgttacgttcttgaaatttcctaatagcaagaccagcgaagcggttgcacccttttcaatcttgcaaaggaaaaaaacaaaacaaaacaaaaaaaacccaagtccccttccyggcagtttttgccttaaagctgccctcttgaaattaattttttcccaggagagagatgtcttatcaggggaagaaaaatattccacgcatcacggtgagtttggtacttgggaaatctgcggtcggccagccaccttttgtagcacagaaggtctaaggaatttttaaaaaggaggggaaargagagggaccgaactttttttttcctttctgttgctaacggaggcgatggtgatggtggtggtggttgtgggagatgcagtgatccaggattagaagtcgcatcgtttgcaaggcattaaacaggagcgcgagtgcacgaaggtagccttaggtaacgcgccagacccggtctatcttttattgtcagtgagagatgctgcagcgtcggccygcggggtgcaagcaaatggatgccagattsaatatgcatgcctggagctcggatattgttctctgggctgcgtgctgcgaggctggactcctccagcagcgatggggagatggggacttggatcctccccgggtcttccgcccccacccaaaaagggctttctggagccttctccgggtccttggaaaaaggagcgggtttgagccctaaggcgtaatgacagcagagggatgctgaaaagggcagggtgtaccggaatggtgtggaaacgggaaggaaaaacagggacgaggtgatgagcagaggaggaaggcggggggcaaggcgggggcttcttgttggccaggaaccggttttgggtgcccccccccggttttctcgccctgtagttcggggctggggccctggcggggattcgggctctttttcacgtctcttttccgccccttctgccgctcaggaggcstccgtgttggtgcatacaaagcggactgcagggtgggcgcggggaccgcggcgagcggccgggcgctaatggcgctgcgcgacgcgggagcagatggcccggccccggccagacaatgatcgcggcggccggagggctcggcgcagtgctggggcctggacttgttggtttgcaaaccacggggaaaacgtctrtgccgtgaattagcgatgcctcagagatcagcaccagtcttgctcccacctctcccctgctccctccctctccccatcttttcctggaaaaattcgttcgtcctattctttccatccccagtgaaatcccagggaggggggaacaccagggaaattcattgttatataaggatgtgcaattgcaaccggccagctgattcccgggtagaacctaggactgaggcagagatcgaaagagccttttaaarcagtcaggatgtgtttttagggctggatataaggacgctctttggttctggttttccytttagccatgggcaccccggcttcctctccgtgcacaagggcacacccatccgcrggagagagaaggggagcaaatgcataggggagggggcgtgtgcycggaggattttctaggatgatctgaagaagggcgctagcttcttcttgaaggcaaaagacccaagatcccaaagggccgggcacggggcacccacccttgtgtgttcactgtgcwggaggaaggagtggtgactctggggagggaggatggaaagcagatttgcagcaagcctcaaataatttgctgtcttcgtgaatgaacaaggcagcttcattttgacagtgtggggagaaaaaaaaaattaaaagcaaacgatcaacaagacttttttttttttttttttttaaagagcgcccccycccccacaccctttaaaaaatctggttgcattatcataggacctatagcatggtattcctccctccctcaccactggcagcctcttatgtaagagccttctggaaggcactagagtgaacgggggtgtggtgtttcactttttttcatggcatcatgttggctcgggatattcgcggtgatggctggggcaggtaccacagtgactgtggargcaggaggtgaagggggaggcctctccttgccttccaggtgatatttattccatggaagcttagagatctgggagagaagtggaggtcattgtagacagaggacaagtgcactgatttgagtgacctgggcaagtggcctaacctctctgagcctcagtttccttatgtgtcatgggaatagaacctggcctcatctacctcacagatttctttcgaggctctgatgtcatgatgtgcacggctttgtaaaggtctttacacttaccttatacaggtgcaggaattattgttggctattctcctttgactttccaaagtctacgtgaggatcagggaccctgcagtgtacaaaattaaaatgatcttattggttttcagtatgttagagagacaataaatactttctgaaccaaggtgtgtgtatttatgtgtaaaattatcttttttccttgctctctagtagcttatctcttttttaaagattttctatgatttccttttcttggtagctgctaaagagaggtagcacttgctgagaatattgttttgtaactgaattttgagttaactattgccaaaagaatgtcattctttgaaatgtgttgcatattaaaagggcaatgtatggttcagcttgccaggtttaagcccattctgtataatacaggtgcatatttactgaacactcgatgccagcattccttccatcagcagcatttgcaataacgatgagtcataatgtagcatttctgtcacattctcagactttatctgctgcttgtcctttattttttagcataaatatcaccggttaaaatataagtgcatcagcaatctgtagtgcattgcatcttagratttgctatctcagatacttattcgtgggagtttacctttttcttaacagcctagttaaaatggcatmaatggcrtattttttgtagtctttttgctatacttgctgtgatttacctcaaagataaatgcaaatataaaggacatattgaatggaaaccttgctatggttgaacccagtgtatttgtgtggtatatcccgtgacagcagactttttggtcaattgtgcttgcttgacacagtctttccaagacatggctttcctatatgtaggtggttttttttgttgttgtttgtttgtttttaaattgaggtttagccaaaagccattttaaaaagtactatcttctttttttttttttgagttggagtcttgctgtgtaacccaggctggggtgcagtgacgtgatctcggttcactacaacctccgcctgctgcttcaagcaattctcctgcctcagcctcccgagtagctgggattacaggcgcccaccaccatgcccagcccattttttgtattttttatagagatggggtttcaccatgttggccaggctggtctcaaactcctgacctcaggtgatccgcccatcttggcctcccaaagtgctgggattacaggcatgagccaccrtgccyggccctatcttctttatatgaaataattttcactgctttttttttttctttggagtccaaggtctaattgaaagagatggttcgtttatctaggataagctgtccctgtgtgttctgactcatcaggtgatgaataggttgccacatacaggcttacctttgtcactgaacctttccaaaatgggcttattttgaacatcacttttgaacagtgaaaatgtatccttagctcacatatcttagcacctgtttctcataggtcagttacgcgttgtgaccttactgcctctttgtttcagagcgatcgtcttctgatcaaaggaggtaaaattgttaatgatgaccagtcgttctatgcagacatatacatggaagatgggttgatcaagtaagtgtaactcatgatatacagatgtatttgaacactttccagacttcccaagtattagataccattcgcatccaaagtatcaaacttcaggaacatcagagagtgaccaacttagtatctgttttaaactggttttgattggtggtaattagtgaatttgaaaactcaaatttagggaattcaaagcaacaattaatgtacacccgttgcattaggtattatgtaatttactatttttaactgaggtgatatgatatctttctgttgccagctcaaatacttggtttgtgatatgttgaatatattaaagttttgcctagaatgtcattgtttgggttggattgcccaaaggacgcaaacgtgaaagacagtctcctctattgagacagcacatctgctttcttcatcaagaatccaagttggaggggccaaagaaagataccaagttaattactaagtaatacagacaaattactgcctaaatcctgagggaattttaggttttattctaagtggcaactagtgcaaataagactgcccttgtgtttattgtgttaatgttacaaaggagaagcaacagggcagttcctgagtttgggtatttttggacgccagagggttaaggaagctgagttcatcccagtatctgcctrccctttctactggggtagctcccggggctctggagaaatagcacatctgtttgaagacaaacactgcagccagtgacagcttttaaataagcagcattcatcaagggatagctgtaaaccggtccagaggagtggaaaactggagtggctgtgactgttgcctgggagctcacacccagatttatgaacctaaaatagattttaacatttccacgtttaatgttttctccatgtgtgtttgctgtgacagtctcagctccaggctctcaaatgccatgactttgatgttccattttcccccaattataagatggcacgatctggtctggtagaatgacactggcccagaagtgtgcaggcctgtgtgctgtttttactcatcactgatttgttctagaactttatcaacttctcctagattaatattccttttaaaaaattggtagaaagatataaaaatattttttaaaagttggaaatgaatcatgtctcccaacataatgaatattcatttttctgccttttaaaattatatttcagctgttagctttttcattatctgaataactaaacacacgcttccaaaattttaaatcattgcaatcatagtgttcactttttttttttttttgctttgatttgttctacctcacccttccacccctattttccytctggtgaaaaggatatgataaaaataaatgtttggaaagtacggccaggtctggagaaaattgctataggataattagctcaattgcaagtgctgtaaagaaagtttaatgacagttcttagaaatatcttggggccttgttatcatttgatcttagggggtttcttgggaacaaaacgtctttgagtggggcctctggtgccttatttaacttttgctttctagtatactctgcattgcctcttgctggggggtaggagtatatagtgttttattatgaatcgtaacaatgatctgaaaagcccacggcacagagcggaggatagtttataggttagtgaaagtagctgtcagatcccatttgagtccacrtttcatttacaacccttatcaccaaccctgtttatttaggcaaataggagaaaatctgattgtgccaggaggagtgaagaccatcgaggcccactcccggatggtgatccccggaggaattgacgtccacactcgtttccagatgcctgatcagggaatgacgtctgctgatgatttcttccaaggaaccaaggcggccctrgctgggggaaccactatgatcagtaagaagcttaaaaatcatcattgtagtrcttaggaagtgtgagagtttgcaaataagtctrttgtttgattctctccttctaaaacttgctgtcctgagccacagttcaatctaccaaataagggggtgaggatgtgttaaccatttgtcttatttatttatgctcattttctgtcaaattttaagttctcccattgaactagagaatatggttctaaggagtttggtaagatgaatgacttcttgctttctctccatgtggacttttgtcttccttgaccctagaatgtgatttggttttgaaaacacggcatttgaagtcatcttcaatgccaccaactttaagccattgagcataagtatttgattgagattttcagaaaaattcctaagagtgcttctttttagaatgaggatgggctgcaacaaatgaaatgctgaagcaggaactcctgttcctctgatatgaaaatcaaatggagrcgatactctctaggctgagtttaacataaaaggaattgggcagccctgtctggagggggacccacaggtaattgtcttttagatatgaaaattgctgacacccacagctgggtgccccttacgtattgctccaagggctttgtgctttttttttttttttttttttttgaracagagtttctctcttgttgcccaggctggagtgcaatggtgcaatctgggctcactgcaacctctgcctccccggttcaagtgattctcctggctcagccacccgagtagccgggactacaggcatgcacccccacgcttggctaattttgtatttttagtagagacgggggtcttccatgttagtcaggctggtctcgaactccccacctcaggtgatctgcctgcctcggcctcccaaagtgctgggattacaggcatgagccaccgtgcctggccgctttgtgctttttgtttaactaaatctgaactgtattcacagcactgtgacacagcacacataatattaagagtttgcttgtgaactgctagattccagcatgcccactgattgtccttttgaaaaatgtcattttgtttttgaggaggtgggcaagctgcatagtggcccgtcagatacatattttaaaaaacagattgcatccaagagtgacagtcaacgtggagtctgtcatatatgaaaagatagcagttcagttcagaagagggtctaagtagaaagaacttagctgtttctgctatagaaaaacctttcttactggttatttttccgagtggtggtctttttgcttgtggctttggggtctatctggaagcttcttttctaycttgcctgagctagaggaatgttgccctgccatcccctcctagtctgagttsccccgcattttaaatcacaactcatcctctggcgttctstctgtcctggycctcagggtctgaagcatcaggaacagctctctcctgtttcagctttcttggcaccactgagaaaagcctccaagtgtaagccttgcgacttgtgtcttgctgtacatgttgccctttaacctagtgggtgccattttccagggatgtcggggggagwtttcatgcacacctagggagagcagagcctgcaccttgtcatttgctggggaatcactggcacctgtgggcgtttctgcctctcctccagggcggactgtggagaaacacttgaacttggagaagcttagactrttcgggtgtcagccgggaaggccaagtcagggtgatcatctgcctcagtttggagttcacagggagaccctgcaggcccctggattggtcacagacagtcaataagccattaaaaacaatatttctctggctgggcaccatggttcatgcctgtaattccagcactttgggagcctgaggtgggtggatcacttgaggtcaggaatttgagactagcctggccaatatggcgaatctactacaaatacaaaaattagctaggcatggtggcatgctcctggagtcccagctacttgggaggctgaggcaggagaatctttgaacctgggaggcggaggttgcagggagctgagattgcaccactgcactctatcctgagcaatagagtgagactccgtctcaaaaaaaaacaaacaaamaaattctcgagtgaatggtcagtgtcatctatcattggagagggaaatgcccccagccaggagttaggagtctggagtgctggcccccttctgacactgacttgccgtgtgaccttgagtcactaccctactctgtgttctagctgtgtgtctccagtgagggatttgtgctacatgaccctggaagtcctttccagccccctacatttggccattcactgaaactcattcactgaaactcagagagattttgcctctcatcaagtacatgttgctcagcagatacagaaagtccctgttttctctcacacttgctggaaagaatccctcagcccaccatctcctgtcctgcattcctgggtctgcctcttccctccacacgctygccccgtgcttaggcccccactcttgttcttgtttttgactctttcctgccttcccttccccaccacaggagcatcaccttcttgccaccacccygaatttctctttcgtcttccccctcagaggctgtggccttttttccattcatccagatgggttcyttctgtttagggacgagggacatccccctctgagtgcagcacctggcccagggagctcagaagagtcagcagatggccttatgggcaggtggtccggaaaggggagtgaggagtctgaccgcctgctctgcttccttggccagaatgctatggcatttgcacggaggctgtgtgatgcgatctggctatagagtggggcatccaatgagcgaacctcaaggaataaaagtcatcagagggggcagtgtatggttagcattgtgacccccaaatgccattgcttttatagcctgagaaaagtactaactacttttgcaaataaccacctatgtttactgacctctgtagaatttctactagcctgcctttcccygggggagggaatggtaataatacaggtgaggaactgaggaatttttatcctttttctgtttgctgaccagacgttctgcattgctttaagtgagtgagtggctgggatttgcttyacagagaaggaggccttgcaaagagaaatagcttaatgccacttcattggcacctaagacctgctactttctttgacttaatatattgagtccagaaagaaatgcctggggcactttgaaaacttcacaggcccactgctgcttgctgaaataaaaaattgaagtgaattggtacaaaaatcyccctcttcctcccaactccccgycrccccgcccctgggcactccaccctcctggctttctggccttctccagaccatgtcaccatgtcacctgccctcacgggtaaatcctcgcctgcctccctgctggctctgcgtttcccaggtcacaggccctggagactcctttctgtctgaaatggcgccgcatgtagaggaaaacacagccaaatattctcggtttaaaaaaggagatggcatgtcagcagcagaagataatattattgccattaaacagagcctgctattgagaatcacacaatgagatctttatgaggcggactcagtgtggagcagggggaacgccctttgccctttccacccagtggtgggtgggcagagactgcagacataccctgcaggcggcatccagaccggctgaggggttgcgggggcggccgcattgctgcttggggaaaaccctacggacttcccagggccttcatggtcatttgagttcaggatctcagagtttctaggaagcagctgggaacagttacctctattttatagaggggaagactgaggccggaaggacagacacgacttgccaacacttaccctgtgcgtcggtgcaggtggccaggtgtggaacatacacctgtagctctggcctcaccgcttgccctggggccacctttgctctcagcctcagtggcctcatctgcaaaatggggcaagttttgacaaaggtggactgtggtggcatcacaacagcatctgcccagtagtgagcactcccatgtggtagctattgtcattccatccttgctgggtactgacaccctcccatctcttgtacactgagctctactctcccccgcatggccggagaaacaggctgagctgccgtagggcttgacctgagtattcactgagagcaggcgctgtctaggcgtggctggcggactgtgtgctttgtgtgttgcttctgggggyggcatcttgaaacattacacttcctgggtcccaccttacctggttaaagtagcaaatctgctggtggggtctgtgactctgtattcgaatctggtgcttggggagctttttgaaagcatgactttcaggggtgcatgccggatctgcacactctggatctccagggcttgggaaccactgctctgaatgtcatttctgctcacctgaactccaggctctctctagaggaggtgcaccctcaggcacaacatacccagcaggcttcctggtccctgggtagcaccgcacagcagagatggggactggactctagcagggaggaggaggggaggtgctgctgccgcagggctggaaggggccctccctcctgagtaccagccttgtcacttctcccctggctgtggctccctggatgtgcatcaggcacctccatccaactgtccccagttggactccctgtctgctccttgctgcttttccggtgcccagtcctggagagggctcgctggaggttgtgctggcggtatctgcagagtcatcctagcatcttcatgtcctcgtgctgccttgagttgctttcatctctgtgttacctcttgcactcattcccttacccacacagatttgacttttgtcacctcttcctggattttggycctgtcctctgaggagtcttactgtctgtcccccacctcctgcctctcgccaggctgtttttctggtgcagctttcattgtgccgccttcttcctctgaagccttcagtgactccytcttgctcagagaatcagcccaagtgtcagaaccctccacgacgcrgcctattcctgctgccccagcccagacttgcattgtcatctcagccagggatgccctccctttctttccctgcttctagaagcttcatcacccttggtggcccagcctgggtgcttcccattcactgatctcctgtgatctgtggctgctgtgtggcctcttcgcaaacgttgggcttttatcccacagcccaggtggcattcagccttgcgtgtggttcaatcaaggcccctctgtctcttacattttcctatttcctgccgcctgggcagcctyactcctcagaggcactctgttaatgcccatgggtgaatgaatgagtgagtgaatgaatgaatgactgaatacactgacgatacttgatatcctgcttcctctgagtgatgccaagagacttagtgtcacaaggagggaggagggtttaggtatccgacgtggactgtgttcaccctgatggaagctgtcgcttgctcagcagtggctccctctgcagccccagctccctgagtccctgtggtcagatctggtcatggtgggggagggtggcagaaagaggaagccgagagcccaggcatggcctgtggttgtggatgggacagctccctctgtctgggctgttcttcagaagagggtgggaacagcagctctctcattggtcctcttgcgagaaagcctgctctccaagtacagagggtcacaacatggagaaatcacatggtcccagcaccacagtggacccagcagtcattcccccagtgccttgggcttgtcccggctcttcctactgagcctccccwtggaggcaggagggctgggaggaaggtgaggtggcttcctgaagggacgtggctcctgaatgtcactgcggtacatccacggcttgtcatttgttcatccatgtggcatgtgggttgctccctccttatggcgagtacacacgtgtgaacgcatgcacacactgtaatatggatgtgtctgtaattgatactttgattattccctttgcagcactcatttgactcgggttagaaagtgtttacaaaaacgcccgaccacatcagacccaagtttcaaagtccaggaccaaagttgttgccacaaaatctgcctgtggcctggcgattagaaagccacgttatccaatgggccattggtgtgggctggttctctgtgctcctccccttgtcccctcagtctccacatggttgaggtcacacatttctcctaaggacacgggtgccctctgcaagcagatgccgggagcctgggtccactcaggtgtcactgcgtgaatctcggccttgaacggctggactggaagaatccatccaccctcaggtgtcactgcgtgaatctcggccttgaacggctggactggaagaatccatccaccctcaggtgtcactgcgtgaatctcggccttgaacggctggactggaagaatccatccaccctcaggtgtcactgcgtgaatctyggccttgaacggctggactggaagaatccatccaccctcaggtgtcactgcgtgaatctcggccttgaacggctggactggaagaatccatccacccccttggcatagtttgggccgatctaatgcctggcactgagcagagcggagggatctcctaatgcctggtgcggtacaggggaaggatggcggagcatcctcagagacagcacagctcttcccaaaggtccagcacgcacactttaccgaatgcttttcttgtgaagggagtcattgggttgggctagccaggtaggctgggtaggcctgtgggggttaggaacttctaggcccttccagaagcaagggcatccccaagtgggtgtctagactctgtttcgtggacattgtggcagttatcatactgtcccagggtttcttgcccccacctggccctgggagctggcagttacagtgctggaaatgagcctgactcactggggtggtgatcttccaccccttcaggtgccctcatcccagttcytactctgcctatgggtgttttacatggagagtcacagcactgggggtttcccagagcctagactctgacttgccctaaagctgggtcacacagactattgggaacttcytgtcgatcctgctggcctgattgacagctggaaccgggagtggaggtggggcccatgggaatgctaggctccagcaagttctgcctgacctttggatgtgagggtcaggcattcagtggtcgggtctcagggttccttattgctagatgaaagcttccacgacacacatgtgtctaagtgtgcccttgtcctatgtcctggctgagtgagttgggcagagacttctgaggacagcgatcgtggcctctccattttcctaaggcccctgcatgcctggagctggctgtgggggcagccagagaagctgcccaatgagtctgatgggagccagacccgttactccttctactcatgatagctttagcattgttgtcccggggcaaccctttctcatgtgaaaccttgcgtggaaccccctccacctgagatatgagactgatgaatgcagaactgctctggttggaatggtgggtggcaggtgggctgtgggggagtccagatcctctccgctttctctttgtcatccccccatggcagcccctctrcctctggagaatcccagagcttggggaagcacaggatggaaaccaacccatcctggcactgcctccccctstgcccacctcccctgcaaagcttgcaatgcgattggtcctggtgtagcctccgtgttgagttgtaggggaaagggtgtttagtaagcaggcatatacccacggagtcgcttaagaaaacacctaaccacactgtaagtttttagtagtttcgtttaatatccctctctctgttcaagacaggaaccagggtagagcacctgtttcattttccctgcctaggtttgggttggttttcttagctttttatgacagcccataataggtgagcattctgccctttttaaaaaaattaatggtgcagagagttttatttatttattttttagaaacggtgtctcactctatcacccaggctgtagtgcagtgttgcgatcatagctcactgcggctttgaacttctaggttgaaacaatcctcttgtcccagtagttgggactgtaggtgtgcaccactacacccggctaattttttacttgttagtagagatggggtcttgctatgttgcccaggctggtcatgaactcttggcctccgttgatcctcctgccttggcctcccaaagtgctgggattacaggcgtgagccactgtgcctgtttggtacattagtttttttttttttgttttttttttttattaagacggagttttgctcttgttgcccaggctagagtgcaatggcgcagtcttggctcactgcaacctccacctcccaggtacaagccattctcctgtctcagcctctcaagtagcttggattacaggcatgcaccaacatgcccagctaattttttttgtatttagtagagatggggtttcaccatgttagtcaggctggtcacgaactcctgacctcaggtgatccacccgcctcggcctcccaaagtgctgggattacaggcatgtcccactgtgcccggccggtacattagttttaaagggaagattgactgtgggtggccaagggatttgtgttttctgacttaaccatccatggctctgaccccaagtcacccattaagggctgtttctccctttttttttcctcttcctccccaagctgacctttctctcttcttaagaagtgattactgatttctttrggttttgagggttctgtctttgactctccgtgattgttgggtgaagccatttgcttaaattccttgcttttagagcgtcttaactgccatggtaatgataaaggggagtgacagtgagtagaaattagagttctttctggttaacccatttgggaggtagctttctttgaatatgactaagtgttccccctaatgacagagaggatgttgctgggggttgggtcgcggtggctgaggctgctgtccagttaagagaattttgcaatgaactagggcagtggtttaaaaaccttgactgcacattagaatcccctggggagttgtaacaaaatgcagagaccagaccttctgacttaattgttctaggtgggcctggcattggtcgttttgaaagcctcaaggtgatagctgggattaagaatcatggatcccagtgcttgttctgatagttggacttctgttgaaaccgaatgaatgtctgccaagattttccgaaacccagagctgccctctgctccctgctttgtcctgtcctcttcacgaagggagtgggatcacactgttgctatctggccagggtggagtctacagccagatgctccccagaagcttaaccatggaggggctgagctaattgtcaccagaaagagcctcctccttcagttgctgtccttggtgttcgggaaggttttacttggctaattccctaaaagggcactggttaggacttggagtaagtggtgatgagcaagagcagggctggctggtgggacagggtgggtgccgggggcagaggggaactggaatgtggactgctgtccccagcctgtggccacctgctgtgctggtttccctgagaaaaccctactgtctttaggttgaatctgtagtgtttatgacctaatcactctctaatgataggtcaggactggaatctttccttgtggggagcctgtgagacaaaaatcaaaagggcctgataataacatagaatcatggactcttaaggcagccattcacctccttcccagccccgctcccacagctgggcacggtttattggaccaggcttcagaggatgggattgtaagtaactcaacaggacaggatgggagcgctccaagaatcagatctaagtttaacttccctttctagtgctttctgtctgagcgtgatcatcctaatgtgtttctagatggctatttccacatgtgtaaagtggagacaatcaattcttatgtcttacgactatggaaaaagtgagtttttttgtgccatactatttgaaagtaatcattgtgacacctttggaacaagtgtgaaaagatctccctctctctctctctcacacctgtctgtatccatctttatctttttatcatctatctctatctatctattaatatatatttatctatctagcatgacctgggataggtgaattctatagccaggtggcctccagaagcttacgaaatgatcgtctaccaaatctaccatctatctatttccctacctacctatcatttatctaatctatctatatattgatatatatctatctggtctatatctatcttgatatgacatctgtctgtacctatggtctatcatctctatttaatccatcgtctctatatctattgattatcacttatctgttttacttatcctaatctatcattaatctatcatctttctaatctatctgtatatatctattgtttatctaatctatcaattgaccattcatctgttcatctttcatataccaaagatgcagttgcatgccacctgattccagatgggttatctcacttcactgtcacttagtgagatcaggaagaagtctcaaggattgtttcaacttcaagcctatgtacatgagtttgcgttttgaacatagcaggaaaaacaacgatgtataagaagctttcttattggctgggcatggtgacttatgcctgtaatcccagcactttgggagattgaggtgggaggatcacttgaaggcgccaggagttcaagaccagcctgggcagcaaagtgaagccttgtctctaccaaaatcaatcaatcaatcaatcaatcaataactaaaaataaaaataaaaaattagctgggcgtggtgacacatacctgtagtcctagctgcttgggaggctgaggtaggaggattgcttgagccccagagtttgagggtgcagtgagctatgattgtgccactgcacttcagtctgggagacagtgagaccccatcttaaaaaaaaaggtataatgtagcttatagggcttataatcctgtaagaagacttcttatgcaagaaaataaaaattttacttttcgctattttttttttcctcctccaaataatctctggagaatttggagcctgattttcttgacaacacatctggccctgcagatgtaaagcagtgttcccagaaaacagcccgtcaaatcaataactcttgctatctttgaattttcagccttttttggcattcaaatgaggccaactttataagtggccattgctgtgctgttgaattcaagcccctccgtttttcatggtggattccttgcattgtctgctaggggggttgcattcctcgctgaaccagacctcygccctcttccccgctgccttgcagtttgctgagcttccaggcagggctgcagggtcgtgctgctggaagtattggtgacaaattcttccccagtgggtgtttcggctaaggaagcatttagtcatgtagggcctaccatgcccagcagtgcagcgtgggagaggcctggcagagggcagagctctcttctctccagccgggtgtggctggtggctccttcctcttttgtagtgtcaaaccaagggatagtatggacccagcagaactgaaagcaaagggaggacccattattagccagttctggcagaggcgagcagcttctttgtgtggacaggcatatctcatgcctttttgcttcagctkggagtttgttttttttttaattactgttatttatttatttagtaccttagctcattagctgcagaaatcacaggggatgaaaaagcaggtaggatgggtccatccttaaagcaaggagagagttgaatgaggaaactgtccctgaggccttgacagatattttggagctaactctgagcccagtgagggaggacctaatcttttggaggaagtgcaactttagcttcagagttttaaatggaaactgggcagaaagccacagcttgggcacagcattggtggcgtgttgttgtgtcactttgcacagttagatggggcttcagccctctttgtaggatgaacgtttaggttcttgtccaaaygaatacacttctatatcctactaaaaatgattgcaggacagcagtgcaaaccagggctgtcctaggcaaacccaggcatctgtcactctaaaggacacaaggacacgtgttgagtcctcttgtcctccagtgagctcgggaaggggatgaccctagcagttgctctctggacctctccacagacctgccgggagtcatgggtaggagttgtgtgattctgtccttttcacaagagatggttagaagaaagtgaggagtttggagggagcagataattgatatcatttatcgggaatctgtgggacgcaagccctgcatacaccatttctaatccttccatcaaccccgaagatagataggcttatcctcctgttataaatgaagtaatgagcagtccagagaagtgaaatgacttgcctgaagccacagagcctgcaagtgcgagggctgggattccaatccaagctctgggccaatggcccttgcatatcctagaatgcgagaggaacgtttgttttgtagcagttagacagcctgctcatgaaagctgctttgtgcccagccttgtgacaggtgctttacaacaatcccagacacagcacccaccttgagtttgccctcaggtacagggctcctatccatcctggaagaacagaaagattttggtgttcaagttttatcctgcccttccatccacctgttatttaaaagtactttttctgtaatatataggcagaaaatgatcagatatcatacgtctcctactaagtgggaggctgcacccagcatggaagatgctcaccaagacggtggtatattgggtgtctcttctctcctacagaagccctgggttgatgccctagatctccccttgcatcccagagggggatttggagagcaatcaagaggagtaactgatgccatgcattcatcaactgaacttaatccttcttctgggaggcccgggagccttcttccatgcggggccagattgagctgatttctgtcacgtaggctgctccgaggttgccttgcccttgcctggcactcatcttttgcatttctctgaatcgctttggcgtgggcttttatgaggttcattaggctcagcacctcccatgtctgcttgggaaacaccacgggcagatggcatttttcttttcttttctttttttttggatacagagtctccctccgttgcctaggctggaatgcagtggcttgatctcagctcactgcaagctccgcctcccaggttcacgccattctcctgcctcagcctcccaagtagctgggactacaggcgcccgccaccacgcccaactaatattttgtatttttagtagagatggggtttcactgttttagccaggatggtctcgatctcctgaccttgtgatccacccgcctcggcctcccaaagtgctgggattacaggcaagagccaccgcacctggcctcttttttttttttttttttttgaggggcagagacaaggaggaagatcagacaatttctcagagttggaattgtgttctgggtattgtttttctcctttatggagataatccagggagaaacatgaagtgtaatggaaagaatttgaggcccaaccttcttgatgatgcatcttcatggagctgggagaccttcgtgccagggtcgactctgctgcttattagctcaggctcggtgccccacggcttggtcctggttttctgaatcgtcagatgcacctggatcagcatgtcttgcataatagggttgctttgaggatccagggaggtggtggctatggcagggcttggacaaattacatgtatgggggagtagccccttcaccccagttttgctcctgaccgttgaagctttttatattgacccrtggctactgtggtattcgaagggctaaatttgttttgtgacttttgccttcagcagccatcgcattacatcatctaccttttcttgtgttcttctgtcgtcgagaatcaattaaaatggtcagcattgctatgaaatggtttatttttttgtggatgttttagagctcctcctctccatctcctgaatttcttttcttgctaagcctattcagctctgttttttagagagttcttttccctcctgctctatgaaaacgtattttccatgttaaaaaaggaagatccatgttgctgtacttaatgcttcatgttttagaatgttagtgccagcagaaagcaccaggagacacccgatgtgcccccaccttggtgagcacctttccccccaggcacagtccctgcttacgggagatttgaggcatttgatcattttttcccgttagcttacagcacaaagtactttgaaataaagattggctcgcagggcaggttgaagcttcaacaccaaaatctctctgttccttgtgggtggatgggagcctgacacctgattacaagctccaggtgaagagcaggtttgagacttacaccttgtttattgcaatctttctttcattttgcaggcggtgggggtgggggaatgaaagcccagaaagggatgtggcactcgggcaggacgggggctgcttctgtgccttttccccactgtgcgtattcttagctgcgcaagtgtcgtgcatgtgcgtttggctcacacccagcgggagtgcccttcttgtgaaggaagctcgttctctaccgaaaagctcacttttcagagaagagctggagaaggcctgttgtccatcttagtcctgaaatatgagttttcattccatggcaagtccttttaatgaaagatggactggagaagctgatgcatagaaaagaaataggttcttttatgtagagggggaaagtgtccactctgcggtatttcctgggtcctgtggcttgtaggcatttgaactgttttgtcttggttctgagagagtcagatgattcagaagctgtgttctgctgaacattcctgccttcttgacagaaatcccctatttttgtggtccccctggcaggtaaaggtggcccctactgacttgtaggatttctgtccatgattgtgtctgaaatgtcattttttctggttgttttccctcttcatgtattagcttggctctttcttctcctctttgtctttaaggtaatttgcaaaggtcacactattcttgcttcttcttagaaatgtcataagggattttcaaagaaagaaaatttctgagtaagagtatctccctcccctcccctcccctccctccactcctctcccctcttttccccttcccacttcctcctttcctttctttctctcgctctctctctttctcatttatgttagcttacatgagtatactgactctaaaaatttttgattctactactgcactccagcatgggtaatagagcaagaccctgtctcaaaaaaataaataaataaaaataaaaaatcttaaaaaaatttagatatgatttgtataccctcagattcactctctgaaagtgtataactcagtgctttttagtatattcacagaattgtggaagcatcactaccatctaatatcagaacattcttaccaccccaaaaagaaaccctaccaattatcagctgctccccattccccacctctccccttgcacccctagcccatggcaaccactacatttctatagcgttgcctgttctggacatttcatataaatggaataatacaatatgtggccttttatagctggcttctttcccttagcataatgttttcaaggtttatccaagttgtaatatgtatcaatacttcatgmctttttatggtcgaataatattacatttatgagtagaccacattttgtttgcccattcatcgatggatggcatttgggttgtgtccactgttttggctattgtgcatgaataatgtacatttgtgggcaagcatttgcgtgggcgtgtgttttctgttctcttgggtatataccgaggagtggaattgtggggtcatgtggtcattctatgtttaattttttttttggccatgttactggcaaatatatttaactttctgagcaacagtcagactgtttcccaaagtggttgtgctattttacactcccaccagcagtgtgggagggccccggtttcttcgcatccttgccaacacttgctattgtctgtcgttttgattatagccatgsgagtgggtgttaggtgctgtgtcattgtggctttaattttaggctttattttgaggcccgtgtactcattcactgacccctagtcacatttatcttgacctgtgatgtgagaacttggtttgggtgtgttttccctactctgcactggctcatctggtgtggcaagtgcaaagatgtttgcagagatgagaatgagtacctgcaaccaggggtccccagaaaggcagccctcttagctctccccactgaggacccttgagccctccctctagggctcaccatttgtggctggctggaatggctacctccattcccttgagcctggcaccgctcctcgagatttgctctgatctcaccgcatggctgagagtaaatcctgttttgctcccttttgtgagccttcttctttctgcttcctgatggggtgggcagataggtggttccatgctggggagggaacttggcagaggccctgttagcctcttcctccagtgtcacccttctgacagcacacagcctgcggggtccaggcactctcagccatgatatggaccatctccagggccagtccattcctgccgctgatggagattccctcctgatctccagagggcagaggaatcagaatagtttccttctacatttgtagtttgcaggaaccattgctcacagctgctccctccttggatgctataccctcactctgtaagatagggtgggaaatgtcgcctactttacccatgagagcatcgcagaagggagaggctgagggacttacccaactagtatgaggctgaatgaggactcagatgatggtcatctggctccggggccagcacttaatcctgctgggtatgttcctgggccctctctttttttgtttttgtttttgtttttttttgttttgagacagagtctcgctctgtcccccaggctggagtgcggtggcrccatctcagctcactgcaagctccgcctcctgggttcacgccattctcctgcctcagcctcccaagtagctgggactacaggtgcccgccaacatgcccggctaattttttgtatttttagtagagatggggtttcaccgttttagccaggatggtctccatctcctgaccttgtgatccgcccgtcttggcctcccaaagtgctgggattataggcgtgagccacagcgcctgggccctctcttataggaacttcaggtgctaatgttgcaggatttaggaggacgagagagaccttgggttgaaacaggagaatttttactgagtgtactcaggcccagctgacttacgtttaaaagactgggcctggaacaaagacagtacttgacatttatatatattttataaaagggggtgggctagcttgaaataagctcatagtgktgcgaaagcagggatattgaggcaggacaaagacaggattgtatatgactgttgccaagcaacctagatgtttgttatttaggtttgcctgggcaaaggcttattttataacctttattatggtgcccaggcagctgtagtttaggcttatttaggctttttatgacttttgttgtattttttagataaaacagaatacttgaagttactagttatagagaacaggaatttataaattttataaaacaaaggaaatttttttttttttttttttttatgttgagggagtgctgcgagagtttttaggagcgtattagataatattattaagacttttttgggtctgggccatgcctttgctgcctttgggacaagttagcttaatacaggaaaacttatttttttttaattttatataaaaattctcctgtttcaacccgagatctctctcgtcctcctaaatcccgcaacactaagtgtggttcccttaagtgcactggattcaaggtgactttgtccttgcttttggatgttttggatgtaacagcgatgagatggcccctcccagagctgagaatggagagtattatgctagacacctgaggctgcagtgatgtgggctgatggaggggtgtcaaggagaaagcatgtggtcaccttcatggcaccatcacagcctttggtttgtttaaacaaagtgaattagtgttgtggtttctgctgctaagaaaaccctgttcgtttattcattcacctattcattccttcatccgttcatttattcatttattcatccattcatccattcagctgacatttattggccatctggcaggtgctgatctgggcattagaagtacagataaggtcctctttgcaaaaaacttcttgtctattgggaagacctacaaagaaaagatgaaaatgaaatgtgaagattgctgtactaaggttccagtggaacagagaagagaaatctttaaaatctgcctgggagagccaagagaggcttcagccaataggtcctatgtgagctgacccttgaaagccggctcaaattttaccctggggtggatttcacccatggggtgggcaggagaagggagtgtccacscaagagagagatgtgtgcagaagaatttggtagatgagtctggtgtattttagaatttagactccggatttgaccataggatgtttgagttctatcttcatggcttgctagctgggcaagtgacttttcatttctcggagccacagttttctttcttctttatttatttgtttttatttttattattttttttgagacagggtctcrctctatctcccaggctggagtgcagtggcccgatcttggctcactacaacctccacctcccgggttcaagcgattctcctgcctcagccttctgagtagctgagactacaggtgtccaccaccacacccggctaatttttgtatttttagtagagacggggtttcaccatattggccaggctggtctcgaactcctgaccttgtgatctgcctgccttggcctcccaragtgctgggattacaggcgtgagccaccgygcccggctctttcttctttattttatagtggtagcatacataacacaaattttaccactcgaactattattaagtgggcagttcrgtggcattgtgtattcgcattgttgtacagtcatcaccgtggtccayttccagaactttatcatcatccctaactgatcatcatccctaaactgttgccattaaacactaactccccattcccacctttctctagcccctggtggcccstattctattatagttgtttctatggatttgactgttctaggaacctcatgtaaatatatatgcttatgacattgcagaatggccccaagttcacctatgtgatagcctgtgtcagaatttccttttttttatggataatatttcatcktatatatagaccatattctgtttatccattcatccattgattgatagatacatgggctgcttccaccttttggctattgtaaataatgctgctatgaacatgagtgtgcaaatatctattcaagtccctgccttcaactcttgggtgtgtgcccgtaaatggaattgccgcatcatayggtaattctgcaccacagttttctgatttgtcatataatttcagggttactgtgcagcttaaatttgattgaaggtacaaagtactgagcattgcctggcacataatcagtattaagtcccatcctgaagggccccttctagcctctcctgaaaagtgaaccytttaaagcaaaagsacttttaactatttggatgaaaaaatacctcttcaaatgtagtttatggttcttaaatggaggtcctttttggcacttttgtggagtttgggtgaggagtcagatggccacatttgcatagtgaggtgtgattgggtcctggaatgtcatgccagggagcaggtgaaagccaatgagtattctgccaggtccaaaggcccagtggccagtttccatctggatgggcctggaaggcttcctggaggagggggtagtggccccagctggggaaagaggaggtaaaggaatgggtgagaacctgcctgcctcatcttgagagaggctgaggaagcacagagctgggaaggtagccactggtctccatggccactatgctttgaacatacctttgctgcagggccgatgaaaagttggacgttagctatcttcatctcaacctactcccygtcaagtcttgctttttttttttttgagacaagagtcttgctctgtcacgtaggctggagtgcattggtgctatctcggctcactgcaacctccacctctcctcctccggggttcaagtgattctcctgcctcagcctcccaagtagctgggattgcaggcacatgccaccacacctggctaatttttgcatttttttttagtagagacggggtttcaccatgttggccaggctggtctcctgacctcaagttattcacccacctcggcctcccaaagtgctgggattacaggcttgagccactgtgcctggccacgtcttgcatttaccatgggaaattgttagcgtggtcatcatttggtctgctttagtagagagtatcttttatgtttctcaaaggcgttatgttctgcattgtaaatgtgcggaaatcagtcacccagtcacctgaacttccatttaacatcaggtccctggccatgggacttgggcaggagcaccagggctggcccatcaagtacctcaatatattgctccctgatgagggaggggccagaatacatgttatcactactgtttaacatggttccggatatgttagccagtgtaataagatacgaaaaataagaagtaataataatggggagaaaatataagattattactatttttttttattgcccaggctggagtgcagtggtgtgaactcggctcactgcaacctccagctcccgggttcaagtgattctcttgcctcagcctctcaagtagagtagccaggattacatgcacccactaccacacccagctaatttttatatttttagtagagatgggatttcaccatgttggccaggctggtcttgaaatcctgacctcaagtgcctgcctcagcctccctaagtgattattactatttttagatggtttactttagccattcaaaggaattaaatgaagaaatatttgatctaagaagaaagtttatgaagatgactgacttaaaaataatgtattaaaaattaatagcttccctgtatgtcataaataaccaatcagaaaacataatttaaaaaatccatacacaatagcaacataaaatataaaattactaggaattataagaatacattcttatatatggaatccaagaagagtcttaaataaattaaaagaaatgctrtgttagtgaacagaaaaacccaatactgtaaagaagtgtatactttagattaattttaaaattgaaaacctcaaaaggtggttgagtttttgttttgttttccatttgaccaaatgattcttaagtacaggtgaaagattaaacaggtgataagaaccaaaaaatattcaaaaaggtcataatgaataaggctgggagaccactactggctagatattaaaacaaactgtaaaaatataataattaaagctgtgtggtactagctccagaagagacagctatataagcaggttaaagtagaaaatctgcaaatgtgactaactgtatctaggtatttagtatataaaaaaggctacatttcacactcatggtaaaattgtaaaatattcatagtattatattagaagttaactattttgaaaaccaaagtaaacatcttaccttagttcgtataccaaaatatatcccagatggattaaagaattacatttaaacagtaaagtcagaagagaccagaagaaaatacagatgaaaagccatataatttagatatttcagcaaaggcagaaatcagaaaagatggagatgcttgactacatagtaattaaaaacattactaacagtttaataataaaaggataacgaagtaggacattcgacttgcaatatatgataaagggttgatgcatttaaaatatgaaattttaacattttaataaaaaaagcatgctttaatagaaaaggtaaatggtatgagcaaggtattcacaaaaaggaaataattccaccattgaactataaaaaatattcaactgaatgagtaataaaagaaatacaaattgaagtttcactgagctaagtttttatctactaaactttcaaatattaaaaggggttaagtaagctgaaaaaaatgaaactatgttggaggattcacttttatctgttttatttaatttcttttatataaataatacttcaggcaaatatgataaacttaataaatgtcaattctgagggggraagaataaaggagttaaataagtagaagttgtaatacccagtgttggctaggttgtggttaaatgaacactcaaactgcggataggtatttacattggcatggccctttctggagggtaataagacagacagtatctaacaagagctgtaaaaatgtgtaaacaaaaaaattcatacgccttgacctagagtaatctatatgtaaacatttagctctaaggatgttcattgtagcattatttataatgaggaaaacaggaaatgagctgaatgatgaaaattggtgactggtatagtaaattaaggccatccctagaaaatagtagtatatagtcattaaaatttattttgggggccgggtggtgcctcacgcctgttatcccagcactttgggaggctgaggtgggtgaattgcctgacatcaggagttcgagaccagcctggccaatatggtgaaaccccatctctaytaaaaatacaaaaattaaccgggcatggttgcacgcctgtagttccagctacttgggaggctgaggcaggagaatcacttgaacctgagaggtggaggttacagtgagctgagattgcgccactgcactgtagcctgggcaacagagtgagactctgtctcaaaaaaaaaaaaaaaatcattgtggggctgggcgtgatggctcacacctgttatcccagcactttgggaggctgagatggaaggattgcttgagcccagaaattcaagaccagcctgggaagcgtagggagaccctgtctctacaaaaaatttgaaaattacctggacatggttttgtgtgcctgtagtcccagctacttaggaggctgaggtgggaggattgcttgagcctggcaggttgaggctgcagtgagctatgatcctgccacgaacttcacaaagcaagaccctgtgtcaaaaagaaaaaaaaaaatcggctgggtgtggtggctmatgcctgtaatccccacactttgggaggctgaggtgggcggatcacaaggtcaggagatcgagaccatcctggctaacacggtgaaaccctgtccctactaaaaacaaaaaattagccgggcatagtggcacgcacctgtagtcctagctactcaagaggctgaggcaggagaatcgcttgaacctgggaggcggaggttgcagtgagcctagatcacgccactgcactccaacctgggtgacagagcaagactccatctcaaaaaaaaaaaaaaaaaaattgtggaaaatatttattaatatgaccatgttcacagtatattgatggaaataagcagaccatgatttcattatgtctgatttgatacttttttaaaaaacagctttttgaaacataaaaacattatgatgctacttttgtaaaaagtgtatatgtgtataataagtagataggaaaaagattgtctagacatacatcaacatagtaatagtgactttttttggatgattggatgagtcatggaagattttattttttttctccattctttctggtgttccagggttttggcattgaagtacttttgtacttagaggagttttataaaaaacaaaagttccctttgagggatactttgcatctggactgttatctcttacccacatcattcttgaggacgaagagaaaatacctgtgaggaagtatttacatttgttacggtggtgcwgggctgagtttgtgtggaccctggactcccagctgtccacacagttataaagagtaattaaaagctccctgaacaacaggtcccttatcagccttaaaccttattgttcagatacattggcttttattcatagtcttactaatcaactggggacaaaaaagacccattgaaccattagccctcagcccgagatgagaagcgcatgatggtacaatggccgtggttcagactcagatgttatgctatgttttgaattcagtccaggttcctaggaggaaaacacccatcaaattatgttggctttagagcgatctcagtcaacagatgacatcaccgacttttccttccctgctggtctttatttggaggggatgcaagaattgtgcaaccttggaataaacagaatagagacccgactcctcactcattgtgtttctgagtttagtttcaatccaacagcggatctgtttttttactccatgtaatgggactgttgctgcagcttttgtacaagggtggagtgggtgtccatttgctgacgagcaccctgtgtacacgctagtttttatttgaacgaggtgctcttgtctttattatgtattgtctgcccataaatgatgtcttgaaatagaggggtgagcatcacctcatttatttcaacccatatttgtacagaaggatttttgtaatcaaatcatggggtttgtgtgtagaactcagtaagaagtaatcatgaccctgtccgttcatttgctctttgttctttcctgttattaacaatggctttggggcttttggggmgcatttagttctgcacgttgtgtatgtaagtagatgttcttctgtgggggctgcaagtccttaagttatagttggattcccttcccagcaaggaaccaacaggaaggaaaacgaagtcaaacccagtctttgcacgtggaagcttgtggcgtgactgttatttttttgtgatgttctgtacagccctgtaatctcttatttttggcaagccaactctgaatctgtggtcccgtagccccaggcaaccaaaagctgagacaaacagaggaagtgtcgttattcacatgtttctctggccacctcatcgggctggacgctgccggctgccacccgtcgctgagctggagctccccagagtgcagcctggccaggcagggactgttgaccctggcccctgtaggaagcacctctggcttgtcccccagcccccagggtccctgccactcattacttctctgcactctttctgtaatttgttcatcgcctggaatttatttctggcagactttgtggtcaaaactgggaagtgtctgtttccttaaaacagcctttcctcaaacccaggaagtgaagtagggagctatccttcctcacctcctccctgtcacatgcacatgggcatacacacacgtacacactcacccatgtgcacacacacaggcacacacatgagaaagggacggggaaagctagggtgtccaccccagcctgggctcctggtatccctaagggttttggaagaagagtttcagtttttcaaagcctgctggagatgtaactgtcgtgatgtttcgtgggatctgcaagagcctgtagcgtcaggtttctttccttttgattgggatgacatgaagtctgttaatgcgggatcgtttgtgttatctgctctgataggtggttttacttgcatttgatttttgatagaatgagagatgaattgatttgttcctgatacattctgttgggatacartccatttgataggaaggttgtttacatcacagtgtcctgyatttgggggctgccctgggatgtgaaaagtctgtttatgtctgttgacagagggtctctatgcttcttccttttctagyatttactcttatgttacaattagtgcctgcttgctgtgtgaacaggacagatttgtcttgtttgtttgggtcgtatgcagtttcatgcagaagacttagctagatgagtgactcaaagttccatgcctggggccctccaccctccttccctcaatcacgcctttatccagtcccttcccacgccctgttcctcattggaatcctctgtcctagcctatcccccctgctctcccctggcatagaagggtgcatctcgtctccccacaacagcactggaaggtgctagaacacttggagaaaactagttctgtaccagggattatgttcagcaggtttatctcctcaaggcacccctaaagtatgtttttactatttaacacacgattttgtaggccctactgttgttagctgttcgtagatactatttcagaacaatgctgtgagtagatactattattaggtccatttcacagataagaaacctgaggccctgacagggtaaggagtcctaaggttctgtagctagccatggtagagctggggtgtaaactcaggctttctgactccaaagttcatatttttaatccctatacagtgaagtaggcactgttgccatttctattttgcagatggggaaactgaggcactgaggagttaagtactttgcccagggtcctaraactagtcagtggtagagccaggattctacccagacaggtgagctctggagccaaagccctgagcatctgtagtagattccttgtggctttctgtcctgtccttgttccgagaaagttcccaggggacagttacggaatcactgggtgcttgctgttctcacacgcacagtttctactggctctctagcatttctttcattagtgagagaatgtttcagcccagcttttcagatggtggagttgaggcccccttgtctgagctgggtatttgagagccagcaggcttgagggcctgtgaggtctctggaggacacggtggtggtggggccaggagaagtcacttcttgggactttggaaagcctagaggaattccagaaatgaaacaccacacacttactggaagccaagttcgtgtttctcccactggtggaagggatatgaggtgctgtaaacgtggccttttttcagatgcagaatgcctgtctaattacaggaaacagagatgtcgccccacactgagccaaggatttcaacatctcttggagaaattctgcatggacctgaagtttgaagctttgcattgtaaccaagttggctctccttgccttcyccccaggccacgatttcgtcatcctgctttacggatggcatttcctattaagtgtctgtctgtgaacataaacatggagctgagacaaagcacagcttctccctggacccggaaagagggactcaggcscctggggctggggcctggctccagacctgctgctgctgcctggcctggttcggggatgcctagcctaacaaggcagcctgggctgggaatcgcttaggcctcaggttgatgaagctgggagaagggttgagagggcaccagacctaagatggtggccagagccatttaatcatgtggttgtaaaattgtcagtaacttctttgtatggctagttgatctgatctctcatgtaggactcagtcccccagttggatcttggaaggtagmcatttatttgaaacagacagcctggtagagtgaaaagagctttgtgttttaccccctcagatagtaagcaaagaaaatggaaaaagcagcgctgtctggggtgacatcctgatgcattgctggtgacagagtgaagaggtgacacatttggaacataatgtggccatctgtatgaagaaccatagttcatccagtcatcccaaccctaggactctccagagaaaaccgtttaaaataggrggaaagttatttgcatgaatatgttcataagaacattatgtataatagaggaaatttggaagaaacctataggttcttccacagggaaattgttaaggaaatgatggtagattctccgcaagaatggctcccattaaaaattgaattagkaagactctaagataatgtggtattaagaaaaaaactccatgattaaaaatgagcatgggccaggtgtggtggctcacgcctgtaatcccagcactttgggaggccgaggcgggtggatcacttgagctcattatctgatgccctgaattggctttttctcatgcacattaggttaaggtcagtagttactcacktaagttacccattgcatgtgtttccagtgacagaaaaggatttagggatggatcgttgaggtgactgctatgcatagaaatgcctagaaggaggcgktggtttaagctgtagaaggaggcaggtgccaagtgctcccagtttggggtttgagctcccacattctgtctgcacagcagcaggcaagtcccgtggcctccaggctctgcatctgtgatgtaagatcgtaaacctgtcctgcctaccttgtttgagcatcagatgagataaggtacgtgataacactttgtgaatcacttaaaaacactatgtctatgtgaggttgatattattgctatycaataaatgcaaacgtgtaggaaattataaaatgattcaactgttccattcctgtttttgaaactttctgaagagagrtggatatgtttccctgaggtggggagctagggttgtgcctgtgttcatccaggaaaatgggatgaaaagcccaagatacatctgcgacatcatcttcagaatgtgaaattacagtgggtttggaatctgggccttctctctgcctgctccctgcctctccttccctacccacagtctccagctctgactcctggcctcccagggtcctctcccagcagcctggaaggaagggacatcctcattccagggcccaggccatgaggaaggaagcagtgggcagggatgcaggctgcaggtgtgggcagctccaggtgcccactctaggcttcaggatgagtggctcccttcctgcagtgggtgcccatcctggcaggtacagtcaccagagaggcccgcctgcttcagctgcataccatggggtttttcctgagactaaagagggtcctgctccttatatccattgaccagtgagtgatgaggaagactgaatgctgacggacgggaggaaggaagtcaggagaaagggagaagggctggccaggaaggaggagagaggaaatgacagaggagagggagaratcaggagccccatgcctgccagccagggaaggccctgctgttgcactcttcagaaccccaacttgggacattttgaatagatgttaggagtgtgagtggaatctaatgagtgggacagacctcccaagtgagcattgaatatgagggcgggtggggcatggtagctcatgcctataaccccagcactttgggaggccaaggtaggaggatcatttgagcccaggagtttgagacctgcctgggcaacatgggagacactttctctacaaaaaattaaaaattaactgggcatggtggcacgtgcctgtggtcccagctactcgggaggttgaggtgggaggatcgcttgagtcctggaaatcaaggctgcggtcagccagattgcaccacagcattccggcttgggtgacagaaccagaccctgtctcaaaaaaataaataaaagataaaaaataaagaaaatgagggtggaggaagaagagccagcggaagattcttctgagacatgggaagtaaatttgcaagattgctgtctgggagctggacagacaggaagggaacagaactgggatgtggcagggacaggttccaggcactggcaggatgggggccagtgtgcagtgggccaagagggaatgggagcgagaaggtggggcgtcagcaacattcagctccctccatagctcgatgagaagagaggggtggggacaggcggtagctggagggtccttcaggatcattttatccgtatccctttcgtatcttttagtgagtttttgttttccctaactggattgttggcattttaagggcacagtttrtatcttctacctctttgtttcctccamagttggccgatcaccagatcacttaaaggaggttgtttgttttataagcgttttaccagatcttggcttaacacttcccccagagttagtcataatcattctagcagggcttctagatgctgaacaatgaccgatggtgccacttgatttatatgaagatactggtttagttttaaaagcaaacttacattgaacaaagtgtaggaaagagaaaggagagggctactcaagtgcctgaaggtcygagcagtgaagaacatgtttccatatgcctgccacccttaggctaaggacacggttttcctatctgtttattgaattgggtcacttgctttagttataatatatgaagggataagactgaatttcacttctcaattaactagccctcttgctctcttttgatcacacgttctggggtcagattccagctctgccagtcagtggctgcactggccaaggccacgtggttgaccaccatccagagttctgccaagagccttacctgccagaggcacgggaggtgtggctgttgcgcagcttctgtggcccaggccctctgcctggcacattttaagtaatgtgagcggrttacttaatcttactgtctgttcagctgaaaactagggccaaccctggctcagagctcagggggccgttgcgaggattaaatgagagaatccatggaagatgtttagagtcgtaccagacacataggaagtgctgaataaatcagaatggtttttactatgactctcacctttcaatgtttgtgacttaaacttatgttacagttagtcatttcactggcgtgtgctaaccaaaggtggcctggcccctccgcatccattaggagggcttgagtttaaaatccaggccctgtgagtctgcagggaggaccgacgggagagctgggtactcctgggacttcagtgtccagtggatgctggggttctcaggttggtatattgagtcacatagttccatgactcccttggaggaagaggctaaagttgtctagaggcaggtgtgatgtttggtctgtcctgtgtgcactgagcaccttctgtataccagtccccctgcttgcttcttccagacagaagaaaacacagatggcaattggtcatatttgaacagtgcctcttatagcttacaaataccatcttattgaacactcatgaaaaatgctgggatgtatgttatttttactgtttcaaagatgaaaaaactcaggcacagacattctaaatagttccagctcttaggaaaatgcttctttagcattgcgggagaaacagtatatttgtacaaggcaagtagttcaccctgtaaggcrgcacgtgctttggaggcacctaaatactacacagtgttttatgcatgggcgtttttcttacaaaggaacatagctttatcttcctgggggtgtttatcaaaccacatctatgtagcagatgctcttcaagcatttcccatattccctcgtttacaacaccctggaaccctgagttaattattagtcccatttcatggctgaggaatctgaagctctgagartttgaacttcttgtctaaagtcacatggtgaggaagtggtagaactgacctggaccccaggtatctggctctggtctttccaatagtgcctcttcagtgggtatcccttaaattctcaggggcaggtgctttctcctccttttatgccctttttttcagagcaaaaccacgttatcctaactgccaagcacaacccacaaaggctcttatctctccttcaaaaaaagccattccctgcctggttgatgaggtcacctggcattttgcagggcattttgcagggtagatgccagctcgggaaagccacatagataagccagtggatggcttgtgttactgcctccctgatggtttgcttttaattcaagtcgattcatttatctgagatgaaaaagggagaggctgattcacacacattgaaaagcagggaatggtgctggagaatgaggccgtgactatttggaataagatcctggagatgggcagtgctgatagagtaaatatccagggagcaggggaaggtgtgtgcactgacaacaggagttttagcatctgcccctccttgcttcaaggggctggcgggtacccgaggcggggtcggagggctgagtgatggctcccatcctccctcttccctcctgctccacgggtgtaaccttgaggtgggattggagggcttggtgacctctctcctccctcatgctccatgggtataaccccaaggtgggatcacaggctgagtgaaggctcctcatcctccctcctccctyctattccacgtgtgtaatcccaagatgggatcagagggcakggtggagggttacacatcctctcccctccctcctgctccacrtgcgtaacccccagctgacttacagactgtggtacctgctcaactgcttcaattccagaactggaactgcagggaagctgtttctgacatccctggttttaattacaaagggccccttgagaccttgtcagaaatactgccagcctagccctttaaaaactcatgatattgggttctctatcagtgtcgctccctggctgtaatattgtactataattaggcaagatgtttcctttgggggaaacggggtgaagggtatgaaggttctctctgtgtcatttcttaaaactccatgtgagtctatagtgagttttaaaaagaaaaagttccagcctgggcagcatagcgagacctattgtctctacacataataataataataaaattagacagtgtggtggcgcacgcctgtggtcctagctatttgggaggatgaggtgggaggattgcttgagcccaggagatcaggactgcagtgagctgtgattgcactactgcactccagcctgggtgccagagcgagacgccttctcaacaaaagaaaaaggataaaagaaaaaaaaattaaaagtagggtcatttaaatatggcaaactccaaacgggtcttctctttgaagttttagggagcagcttatttactttgtgtctcacactttgctaatatccaaaatgcagaacattagggaaccgcttgaggcaggaggggaaggaagcactgattctcgctgcagcatggatgaaccttgacgacatgatgccaagtgaaagcagacagacgcacaagactacatcttttatgattccattgataggaaatgtcctgaataaacaaatctatggagacgggaagtagattgatggtggccagggtttgggagtagcaggggtaggagggaatggggagtgactgtaagtgggtaccaggtttcttttttgagtcatgttctaaaattagattattgcaatggttgtaaagctctgtgagtgaactaaaagccaccgggttataccctttaaatgagtgattgcatagcatgtgaattatacctcaataaaactgttaaaaaaaacagtagggtcctttgatagttttaatagaagtcataataagaggaatagtcctttttcagagactgcttgtaacttgcaaattcaggccactgtcctggggcatgttcctggctctcataaaccagattcacaggcccaccacgcagaccatgagggtgtttccagtcactcatcttgagggaaggaacacccagtgtgtgccaggcattttgccaggtgcttttacctacgctttattatgtaaactttttgcagccctgcatggtatgtggttttacgccttttttttttttcttaatagacagtctttatctgttgcccaagctgaagtgcagtggtgcagtcatagctcactgcatccccaaactcctgggctcaagtgatcttccccacttagcctcccgagtagctgcgactacaggcacataacaccatgcccgggtaatgtttttttttttttttttgtagagttggggtctcactatgttacccaggctggtcttgaactcctggcctgaagcaatctgcccacctcagcctcccaaagtgctgagattacaggtgtgagtcactgaacccagctcatgcctatctttttatagatgagtaaatggaggttcctggctgggtgcggtggctcatgcctgtaatcccagcactttgggaggccgaggttgggaggaacatctgaggtcaggaattcgagatcagcctggccaacatggtgaaaccccatctctaccaaaaaaaaaaaaaaaaaaaaaatacaaaaattagccgggcatgatggcgcgcgcctgtgatcccagctactcaggacgctgaggcaggagaattgctcgaacccaggaggcggaggttgcagtgagctgagatcgcgccactgcactccagcctgggcaacaagagtgaaacgccatctcaaaagaaaaaaaagaaaagaaaaaagaaatggaggttccaaaaggctaaaccacagtaagggagtactgcagcaaaaactagaatttgggggctccttgacccccaagcctattctcttttcactgctggtatagtcgggttgccaaggctgccctcttggaggggccgatagctcagggaggtcaccagaggaaaggcctgtgagctctgtgcaagtcattttcaggcttgtgtcctcagtggggrctctactccctccggaagtgagtatgacattctgccctattcccttggagcagctcttcccaggagagcttcagtggaaagaaaactgtgggaaaacatttggaggcatttcatggacacgtttctgagtgttatgagctcttgaaggaagcatgtttatttccccaaagtgctcagctgtgtccgggtcctgagtttttcaagggtttataacccccggagctgaatttggatatgcaaggaagccatgggattgcagccagggaacatgctattttttgtaagtgatgatgctgttgtgtagtaaacaggcccctcgtggtaaatggagagcagtgaatggaggtggagggagaagttttgggaaaagatttgcactcagttaatgatgctcaaggtagttcaaggcagactcagtagctcccgggttgcttagtagaaatgcagattactgggtcccagtctggacctgcagcgtcagaaactctggggtaaggtctgggaacctgtgttttatttttatgttatttttttgagacagggtcttgctgtgttgcccaggctggtcttgaactcctgggctctagtgttcctcttgcttcagccttccaaagtgctgggattataggcatgcgccactgcacctggccagaacctgtgttttaaggaacactggagatcattactgtgcaccctgaagtctgaggagtctagcaccagatgatctgacgacacatcattgggatgtggagtcatggttccagtcaccagcctgaagttgtccttgtctgtcaccctccccactttgtctaagggtgagtggaacagacagaaagtagactagtggttgccaggggctgggagtagcaggctaggagggaatggggagtgactgcaggtgggtacagcctttcttttttggtgatgttctaaatctagattgtggtgatggttgtaaggctttagatggcttgcttgagccttgcaatgggaatgagtgccttggcctaaggagaagggaagaaaatcttgtggaggaaatgagcttttatttttttcctttttttttgaggcagtctcttgctctgtcacccaagctggagtgcagtggtgcaatctcagctcactgcaacctccgcctcctgggttcaagtgattctcctgcctcagcctcctgagtagctgggattacaggcacctgccaccacacccagttaattttgtatttttagtagagacgaggtttcatcatgttgcccaggctggtctcgaactcctggcctcaagtgatcttttgccaccagatattaaaatgtatcaaaaagctgctctatttagtactgattgagatgaatggagcaaaatagcccaggaacagaacctggtattgtctctctgtaaagtatgagtgaatttaaaacattattagatatgttatctagtaataataatgataaagtattttttaaagtcatcatgaatcaatagaaggaaaggattattcagtaactatgagcatgtgggtcttagtgtcaccagtacttatccttcttcttaggagggatttgtttttttaatcttaaaggaaatagatatgttaaacctatcaggcttccttatttacattggctagagagcctaactctaaatttagccaatgtataagactaaatgtcaagtatttatctatacaaacacacacatatgtacacacttgcatccacatctacatacacatattttacatacacatatacacatataaatacacacgtacatacatacacatacatacatgcctctttcctgattttattttaccattatttttcttccgctttatcttgcattactctttctggtttatcacattttcttgtattttatgtatctctataaaccactttaaaactttttgggggaagaaagtggactatagataaagaaatagaataaggtataatatatagaaaaaaggcagtaaaaatacacccaaatttgaataggttgattttggggtggtggtggtaatgggattattaactttccctaaaattttctgtatttttgaaattttctactcaaagaatcatatcatcagaaaaaaattattatttctgctcattccctttgctggccagtgaaaggaatgcatttccataagtgagggtctggcagagcagtgttgaggggaggggtctttgccgcagcaaaagctggtccggttcccaggagagcccctcctttgctgcttgacctgattgcaagtggaatgtgagagccagaaggaaatattccatcacttatttagagcattcatttggctcttccctgatctaggcgttcagtacctgctcagagggagtttacattctagtcaggggtcagagagtaaatgagtgaaatggattcagaaacgatgccaccctgggatggtgacatatagccccagtgagaaggatgaggagatgcccaagtcaagagcgaggggaatgggtttccagagagagagagggctgcttgtgcacaggcttggagttgcccaggggttgggcaggtcaaagtgaagaatggccggggtggccattgtgggtgagcaggtcagggataaagagtaccttggagagatcaactaggaccggatctgactggccaagagaaagagtttgaattggactctaaggatggtagacagctactaaaggatttaataaggggaatggcagtgtttgatgaaaggtttaagatccttctagctgcttctgaagggtgatttgtagaaggacaagagatgaagccaggggagtgggtagggagattctgcccaaactgattgctacacagtgatatttttatgcttttcttttttttctttctttctttctttcyttccttccttccttccttccttccttccttccttccttccttccttccttccttccytccytctctctctctytctttctttctttctttcttttatttttgttttgggtgttgatgaggggacatacaacttaagaagaaaaattggaattattttgtcaacttttctacatcagcattttactgatggaataagcttgcatttgaactggacatcatttttgtttttattagataacattatctgtattacagataccagatatgtgtgtacccatttatttactaatcactaatacttacaaaaaagtaaattttgtcaaaagaaaattcagcttagatggccatattgtatgtgtgtgtgtgtgtgtgtgtgtatatgtgtgtgtgtgtgtgtgtgtgtrtatatatatattttttttttcttgagacaaggccttgctctgttgccctggctggagtgcagcggcacaatcttggctcactgcaacttctgcctcccgggctcaagcaattctcctgcctcagcctcccaagtagctgggactacaggcatgtgtcaccatggccagctaatttttgtatttttagtagatacagggtttcaccatgttggccaggctggtctcaaactcttgattcatgtgatctgtctgccttggcctcccaaagtgcaacggctatatttctgacatatacaaatccaagcccagttgatcagaatttagcagtatctgcaagatttgaaccayttcagaaatctgagctctctagcattacatggactgatgttttcttagctcagaactgcttacctgtgtgtagaaaatctaatatttaggaagaataattcattgctttaagtgttcagtcctggtttttatttctattgttgcacaagtttgatttgaccttggacaaatcatttcagtttgtattttagtgcttgtgtgcagaagatgggtagtaatagtcctggtaatcctcctgccatcatgttaactgggtgagagctcttcaagacctaggagagataatagcaggtgcaaagtccctgtggtgggaggcagcaggtagatattttaggagctgaaaaacggtctgtgtagctggagagcagggtacaagggagaggtggtccagggtcatgttatagaggtaggccagggccacactggttggggttttgcaaaccttactggggacttgaatctttatctgaagagcagggggaagtcattggaggatttaaatcagggaatgacataagattgatggatatgctatctcctttaatcctcataacaaatgtatgtgctaggtaatatccccgttttaaagcagcacagaaattagggcagtggagattaaggagtttaccccaggacaccatgcaggtgaatgatggagccaggaaaccaactcrggtcagcttgcatccaaagtcctcagtcttccagatcagcgtacctccatagtaatataacaatgactgcagttttaaaacactttgaactcttaagatgaaagatttcccttaaattacaaagtggtattatgctgcagaaatgtgagcggtaatgagagagcaggtaatgcccgggaacttttgaaaggcccggtccgtgtggctctgctccagcaccttcaagttccctgccgtctggcggggggcgtctcataagctgctttcaacacaaagaagggtttggctgctccccggccatttgacactgccattgtccataaggactcgttgtccgtgaaatgcacccaaagcttgagctttcaggggttttgggaaatcagatctgggcagtgcatgtgtggtttcgctggagacatcatccaatgccaagtttctgctttctgctttctccctcttggataatcagctgggttacatggattcttagaagctggttgtagagatcaccatctcgattttgaacccaagaagccttattcagggttcaagtgggaaaatacctgctggcccacggcccttgaggctcttggtgatgatgacatatgtctgtttctttctagttgaccacgttgttcctgagcctgggacaagcctgctcrctgcctttgaccagtggagggaatgggccgacagcaagtcctgctgtgactactctctgcatgtggacatcagygagtggcataagggcatccaggaggagatggaagcgcttgtgaaggatcacggtaggttgcactgagtcaatgccctctgcagatgtttccgcttcagtccatcaactggcacagccctgggaagaaagtgataatgcttccagatcccatttgtgcctcatgcccatgcctgcccctgggaaggagagagggctttgggccgcagcttatgctgtttggaggtggccttacccagtgcagtaacatgagccttcattgatgataagagaagatgaggcttactgctgggacctgttcttaggtgacagctgctcacagcttattggtttgtgagcaccgtgctctctagccagggtggggagttgaggctgctgagagagagatttaccctcaaaagataacaaatacatatctcagtgaggatttgacagtctcaggagagtgttgggcagccccttcctacaaacctggatggatctaggatagatttgagggctatgagacacttcaaaactgagtgacaacctgagagggcttttcctttccctagaattattttggagaacaaatttccagggattgggaagattcacagagaggcaggaggaatctttaccacctcaaggtgcctctgggactcttgtcaacaagaacctcgggggtttgcggggaagagccaggccacatcatcttcctgggtctcgctggrcttggctagagaccagattaacttcactggatcttagtgttcagggaaacacctattgctttagggttctggggacttccaggcttagaaacaccatgtgctgtgagtgacatggcaagagggaaatctctaggtactagaatgatagaaaatgccccggaatgaaaagcaagagtcttgggtttatttctctgatcttccacagactaactgtgtgaccctgggtaatttgctgaaattttatgggtctcagttttttaaacatttctcatatatgagggtcttggactagatgtcctctaagattctttccagcacaaagcttccacataaaagaaaataggtaamctttgacttttctcacttttgatcatgcggagactccaagtggtttaactgtggatacttagactgaatctgctccaaaccaggcaggagggttaccatggtaactgttgcctggcaacgggagaagggccaggatgtccagaggcatttaactcaggcagctcccagcaccccccaggtggcttgaattaarctccaaggctgcgaggttgtcaggacaattgtttaaaattgtgatgaatgttgggcagggatgtttggtctggtgcctagggaggcaagaactccaagacgccaggatgagaattgcgacatctgcttgttgaactaatggaccttttcttacttaaaaaatcatttkcttaaaaatcagcatggaaggcagtctgtctgccaaagaaaagacatttatcacagttcttcataggcagaaacttctaattcattttcttgttacagtcgcaacagacttrtttggtagaggcagcttaaaaaattaactgtggtaaaataaatataacattcaagttaccatcttaaccatttttaagtgtgtgtgcagttcattgttttaaaatacactcataatgttgttgcaaccatcaccaccctccatccacaggtctctttatcttgcaaaactaaaacrctacactcactcattaaacactaactctccactgtccttcaccccagtccctggcaactgctgttgtactttctgtctgtgaaattgacttctagggacctcatacaagtggaatcatatagtatttgtccttttgcaactggcttatttcatttaccatgatgtccttaaggtttctccawgttgtagcatgtgtcagggtgtctttcctttttaaaggctgaataatattccattgtatggatagaccacatttggtttattcatttatcagttaatggaggcttgatttttgcttccaccttttggctattgtgaataattctgctatgaacatggatgtgcaaacactggcaacttttaattttgatatacttgtaaacttacaggaagattataagaatactaaaaagcatccttgtgcctcttcctcccacawtcacaggttatttatatggtactctgcttcctttaccattctgtgtctccatttctctcctctctctttctctgtactgaaacacacacacacacacacacacacacmcacacacgtacacacacagacagtattatcackttcttatcccttatttggttatttggtttatctattaaaagtccacttctctattttgtccgcactaggggtaaattccttcctcgtgtacatggctttcaaagatcgcttccagctaacggattgccaggtaagaaagtcggcttttcggaagaggcaccctgacatttggtaccttcaggctgtggccgtttgggaaagcagtctccgatgtatgcatgtttcctagcttcctgggaagtggctggtggatgcagttactgatgtaactgagccttggaagagagtatgaacgcagtgccctggcccscagcactgccactccgccgccctggatctgaggctctgccccgcacggcgtgtgtgggagcggcactcagaacctccttagcaaacctggtgcagagccaggtgtcacccaagagcttctcactcccggtccacgtcctgctaagttgtactgcctctgttaatttctgaggggtctttctccatcaaatgtggccagtaacattgccctcatcatatcaaaaaaagtcaggctaatasaatcgcctaggtgtcctgtttctcatcccagaaatgcctctggtggggagatgattgtctttgtgaacaggaagatggaagtccctgtctctgatcccacccttgtctctctctcagatttatgaagtactgagtgtgatccgggatattggygccatagcccaagtccacgcagaaaatggcgacatcattgcagaggtacagggctttctttttcgtcatttcttcatcacctggagggtgagaggcaggctcaagaaagggaagctgcatctgtagcttaacaccaaggtggaaaagcagagggacctggtgttcccttgctggagctctgctcagtctcacccatggcatgaatgccagtgacacacgtgcctctccgtgtgtgccacagaacatctaagtcagttactattgcagagagaggccatttctctcggtgctgtaayrcagctgccttgggtggggtacgggaaccctcacgtcacacacaggcattttacaccgtggctgagggttgcaaatgcaccagtcgtcagcatcccagggaacagctgaatgggttttgggaggctgtaattgatccatcctgctcaggcgggactgggaacagggcagtgaacccttctcttcatgaggtcttgggatgagggcagaacgatcggcagtggtaattttccatcttgcccggataactgcatgccygggcctctgccatcagagctgtgcaaaatccactctccctcacagcctgactttctctaaacattgcaggagcagcagaggatcctggatctgggcatcacgggccccgagggacatgtgctgagccgacctgaggaggtgaatgttcaccaagcggaatgcgtgaatcagtgtcccttgggcactgtgcagagcctcagggaacctgcttcctgcctgttgagaagggggcttctctgatgctgactgtggtctttctgagaagctgtgggtcacgtgtgtgtctgtctgtctacgcaggcaaagtgaagtgttagattgctcctgagggtaaggtggtgtggactgtttcgccagaagattcttctttctgtctgtaattcttcaagcccttgcttgtatagacacaaacagttcttcattggcatcctgcaatgtagattttagtggttcacaacttatggtctccaatatcttaccaaaattcaccaaaacgtagttggaaggatggaaaagctcttctaaatgcctagaaggcgtgtkgggaattgtttttccaaggtaaccctgcacaggatatcacatgatatgcagagtttggtagacagaatcttttaaaattatggagggaagattcagagcaggggcctgtgctggctcaaaggtggagactcaccgtcttggtgaggtgtgtgagttcgaagggagggtgcacacgtcttaggtaatggagaacctgtgttcatcagttagaatttgtggctgtgaaatacttttcagaagttggytccttaatgacaggctggatgtcaggctctaggggccctgactagggagcagcctgcagcttcgagtgaagcgtgcaatcagggaatctccagggaaccaccaggatttccccttcatgggaggaagtggcagaaaagggactggcgcygagcagtgggggaagatcaccaagggcctgagtggaggctgacagtgaggaggctccagaagccygggagggaggagcttggcaagagctccctgcagggctgtggccactgagtcactgagtgtcagcaccgtgccaccmccctgagtttgggatgtggtcatgttcataccagtgtgggaggggagccggtccctgtgataaggaagtggattcaggagggcttggaagcaaaggcaccatctgtgtactgcctcgggtgcaggagggggtggttgggatcctttcagacttgaggggaagggatgaggctggaagaggagaaaggagtcaagacaggcagaaagaygagagtgggagccactcggaatgctttgcacacagtcagggtccacgctttgttctatccttcttgctgcatgcatatgcacacatagacacacatgtacacacagacataggcacacgcagacaggtaggcacacaacagacatagacacacatgcatacacatagtaacacacacagacacatagacacacagacarctagacacagccatagacacctacacacacacacatacacatagacacacagacacatacagacacagacacagacatacacagacacatacacatgcagaggcagatacacagaactgcatgctccaagacactttcagtagcatttgaggccctgaggacattttcctctccccagatgacagaatggaagccgtgacattttcaggattgcacgttcctgcttcaggccagggatgcaggcccttttgtagctatcaaccttctcatgcgtgctaaaggctgaaagggtggcctggcacaggcccgaggatgagggaggcaggcaagcccctgtgtcagctgagggaagccccatgctgagaccgtggctggtggacagtgattgcaggggacagcttgcaggcgagagcaggctaagatcagccgaccataaacatgcctgaggctgattttattttattttattttattttttttcctttttctggagaacggggtctcactatattgcccaggcaggtctcgaactcctgggctcaagctatcctcccacctcttagcctccctgagagctgggattacaggcgtgagccaccgtgcccggccgaggctgattttatgcacatttgtgtgcacacagatccacgtgcacaagcacacacacgtgcacacactcacgttcacacacatatacatacacacatccataggcacagacatgcacgtgtacacacacagacacattttagcatacgcacatgtgcacaggcacagacacgcacatatgtgttgtacccacrtattttcacatacacatatacacatgtacaagcacagacacgcataggtgtacacacacattttcacacacacatgcacatatgcgcttgcacacacctatgcaggcaccatccccctttgcagacacygcaagggttcgtttctgtggtttcacttctccctctgggccggcttctgtgactgccctcgccagattccccaggatccacctgtcgggtggtttaaaccatggcagcataagccatggttgctctcagccctgacctccctggaattgggctttgttcccagggctttgttccgccctgaaacagtcttgggattgggccttggaaatgcacagagtccgggagaggtggagggctgacacagttctcacgtgagccctgttcaaagctgccttcatttagtgctcacgtgtgctggacactgtgttcctggcccacatttcagttttgtaactgtcctgtgcaggaggtacaacatctccttcccacaactccaggggatgccattcatgcaggctgcatggctgtattcagggagcaccatttacattctactgcccatgagtggtggtaccagagctgtgctgcagtgggctccttggttatctctctttakatgaggacactccagaagcatgaagttaagtgactgcccagttatcaaagcagagagctagaaagtgcagggtcctgcctgctaccccaacccctcccgcagtgtacacatactcagcttaaagccacacctggacctgggctttattagaaagtttcctcctgctttcctcccgtttggtgactgggagccagtccctctgcctgccatgtaccagctgtacaaggaggtgagaagatgtcctctgagaaaagcaaatgccacttctgcaaatgctacatgaggctcctgctgagaccctcactcttcaagttttagagccttctgaggggcttgcattccttctttctcctgctttctgcagagaagtacacaaacacagaaagaaagggccctggctttgctgaagaggaaaatgctctcagagagttgttattctggttgcttgtattcatccattttcatactactgtaaagaaatacgtgagactgggtaatttataaagaaaagagatttaattgacttacagttctgcatggctggggaggcctcaggaaacttataatcatggtggaaggtgaaggggaagcaggttccgtcttatgtggcggcaagagagcgagtgagcagaaggcaaactgccacttttaaaccatcagatctcgtgagaactcactcattatcacaagatctgcatgggggaaaccttccccataatccagtcacctcctacaggtccctccttcaacatgtgtggattacaatttgagatgagatttgggtggggacacagagccaaaccatgtcattgctatttcaaccagagaaattgaaaccatttttacgtgattaggcccagcagctgttgccctgagaacttcagaatccccagcaactgattatggagtctccttgagggctggcagatccagggatgcaccagtatgggatgcagtttttcagctgatttagaggccyctcttgtatgccaggccctgagtccttttagccatatgacagcccartgaggcgaggaggggggatgcagggggtttgaaaggcttggatagtggcagagcgtgattagaactcaagcccacaggcacctgccggctgacgtctcctctcatggtgagtttgtcaagagggatctgttgtgtgttaaaccctgtgtgggtgataaagagaacaagtatggaacaattttgtgtgaattttagcttcccagtctacytggggaggtgctgctgatggaatgaaacacatcccagtgtaacttctctgyagtttggtgacctatccatcactagcatgatggttctcttggatttgaactttccaaaacatgttcctaacccactaggcctttcttcccaacccaccatgtgagaccacccagtaggattttccctcgttttccacccagaggattggaaaggacactagggagtgcagacatctggaactgaaccatctgtggctgagaggagtggcgactgagcctgcgtgmcaatccgggcagtgcctggcattgtggggatgcaaaacagataagaaagtgatcctttctgaagggactgtggacaaggcgaggagaaagaggtagacagaaagtgagtgtagagatagaatttgacagtggctctgagctgtaagactgatgtctgggaagagagtggggacttggagatgaggataatgaagaacccttcacagggacgggcactttccagcaggccttgtagaatgacagatgtcctgacactgctctgtgtccctggacaggtcatttccctttctgagttacctcatcattaaaatcagaagataggcgtagtggcttgtacctgtcatcccagcactttgggaggccgaggtgggaagattgcttgagcccaggagttcaagaccaacctgggcaacatggcraaaccccgtgttgggacaataaatggagtagtcacctgtatctctgggaggtgctgagggttctagtggagtccrtctcacacttcacacccatgcaagacgtccctgtccccgcctggtgctgccgggccacaggcatstctgctgtaagtggagagagagggcttctccttcagctgtcttaggaatgaaaaacatttgggtgtttaatatgctttttcaagagccctttgcttggattgtggatttctagacatcccttttcacatagttgatgcctgaaaggccaaatgtgaatgaagttgtctcagctctgctaaattagattaccagttaatgcaattacagaatttaatcttttggccaagctctggtggagacaaggtaaccaattcagttataggggctcagttatttcttgtgaaaaataacagtgttctgtggagcagcctagactgaaataccatgaacataaaatgaaatcatttatatgcttagcaaacatttttgagcacctgctgtgtatcagacaggacattgggagctattgggggcagggcatggaagatactaagcagtgagtaagccccagtccctcccctccaagagttcaagccagagcccttttgctgggatggagagggagccagtgatgttctgagatctgccttccacaatttcacctgctccttcccttgctgattggtgattcctctgtaggatagaacttgatccagggagtcttgcctgatcagatattccacagtcatcatgtgggatttgaaatatcattcatctgaacatccgatgtatttatttatttatgagatgaagtctttccctgtcacccaggctggagtgcagtggcgccatctcagctcactgcaacctccgcctcctgggttccagcgattctcctgcctcagcctcctgagtagttggaattacaggcatgcgccaccatgcctggctaattttttttttttttaatttttaatagagacagagtttcaccatgttggtcaggctggtctcgaactcctgacctcaggtgatccacactcctcagcctcccaaagtgctgggattacaggtgtgagccaccacactgactggaacatccgatttaaagcgccagattatttactcaagcagttcttcaatcttgtgctgarggtcgtaccaggctgtggctggccatgtctgtgcttcacacacagggggccattggtgtagacaaacggggcccactccgttcctagagccctgtgaggctgcattgtttcrtgggtgatgctgacttcattcatgagcatttaatgggagcccagcacaaactccacatcactgaatatcttgactcaagaccctgggagcagaatgaatatatggaattgagagcaatcagtgtctgtgtgtggcggttctcaaacgttagtaagtgtgaaaatcacccacattgctgggtcccgccctcagagtttctagcctgtgagtttctagtccagggcagagccagaaaatctgcatttcttacagactctgggccagtgctgatgtcacaggcttgctgcctgcacctggagaagggtcagaagggagttttcttttctttttcttttgagacttagtctcactttgttgcccaggttggagtatggtggtgcaatctcagcttactgccacctctgcctgctgggttcaagtgattctcctgccttatactcccaagtagctgggattacagtcacctgctgccatgcccagcttttttttttttttttttttttaattgtatttgtagtagatacggagtttcaccatgttggccaggctggtcttgaactcctgatctcaggtaatccacctgcctcagcctcccaaagtgctgggattacaggcatgagccactgtgtccagccacaggagggaattagttcaaccaaaccaatgttgagagacacaaggcaagtcatactcctttgaattgtcccctggggtaggaccttggagaccagcagcctcgccttcatcttagcctctctctggggtggaggataaaggtagcggctcgtggggtgggctgagccacattctcatgctctgctgctgttttgcaggtcgaggccgaagccgtgaatcgtgccatcaccatygccaaccagaccaactgcccgctgtatatcaccaaggtgatgagcaaaagctctgctgaggtcatcgcccaggcacggaagaagggtgagtgctgtggccggactggctgatggcaggtggggaggtttggaggggaggggggctcctcactagggagggctccttttccagaccctcatgccaagtgggccacttgyaccatgttctggcattaacctaattacagcmgggcaaggcaggagctccagtttcctcctctgctccactgctgcggccttgttagtatctatttaaagccatgtgcacgccaaggcggggtgggcaggcacatgtcccccagcccccgtgcaagagctggacttactttgatgtggttgaaataaactaggcacatacacagattacgtcagtttccatccgccccagaatccttggtcacatcatgcacctcccctccaaggctgggagtgatttctgccggggtatgtaaggcagctttgtggggtgtggggatgcattttgccccagacactatcacatccagatgttttggtgyttgataaactctcttgatgcattctgaactggggctgggtctctggtattactagggtgtccactgtaactaaytgatgaagtgcagcttccagtgcttcctctagaggacgccccatgaggcacctcatgcattttgaatgcagctgagccctgttgtcacccaccgctgacaacatgaatttcgataatcacactgcatcttttatgcttgggagttctctcctcgtacagaaagcctgagggcatgtcgttcattttgatggtggatcttaggctgatctgaaatgaacattataaaagggtccccttctyccttcctttctcccttttatgttccctcctcccctttgcytgttgggatctctccatctctgtgtctccacttctcttcccttctttcctgatttctgtttcattttatctttcatttgactctttctcagtccctctgtcattctctctctgtgtctttctttccctgttaggaagggagccatttgacctctatggcttggtttctacttccctgcatcatgcaatccacatggatcaaggtgggctgtgggatttttttcactggcgggtgacttgctgcaagccctggaacaaattgctcaatgatgactgagtcatcttgtcccagagatgatgacttccagacggacccagcgactcctggccctggttctttggagtgctcctggggcctctgtccttaggctacacatcaaatggttgcygcctttctgtcttctcctggcaccttgaaggaattgccttttagaaataagaaagcattcacctaaaataatgtaacctactcagaatgagctttgagttgttttctaggagatattgtggatgacgatggaatcggtggccttgggccacccagacacgcatttgcaagaaggcagcgcatttgtgggaatcagcctctgtacagaaggccggccacagcactgctgcccccacgtagtgtggggatggttggcatagtgtctgaaagggggaaagaatgagacggcttattttctgtattttactactgcgctgtacctagatgatgatgatacgtgagttaggctaacatttcaacgtaattttggatagagaacttgtctaaagtttacttcatattcaaacctgtccaaatgagaagacggaggggtcctacatgtcccagactttagttgggggaggtggagtcgtgggccagccctgccgcaggcctcctcctctctgtccctcagggttcttctcaggtggagttgcggagctggagtgtgttgttgcggtgcccagtatggacctattaccccaactcagtgcctggtagcccccgttgttgttttttttaatttattttattttatttttgagatggagtctcactctgtcrcccaggcaggcgtgcagtggtgccatctcagctcactgcagtctccgcctcctggactcaagcgattctcccgcctcagcctccttagttgctgggattacaggcgcccccccatcacacccatctaatttttatatttttagtagagacggggtttcaccatgttgaccaggctggtctggaactcctgacctcaggtgatctgcccgcctcggtctcccaaaatactgggattacaggcatgagccactgcacctggccacccctattgtctttataaccttgacacactgtgtgtcttatggggtgagcagtaggaggggactttagtctgttcccttccagagccttctgagtgtgagtccaaatgtgcccacaccatggttcccaggatggcatttgcattcaaactgttacccattaatctgtgaaagcctgagctttagacaaacctgagctgccagaaaggaatttccagtgcattcaggtgctaatgagcaggaatgagaagtcctagctaacttcctaggctcttaggctctttcccatcttgctggaacttcctagcaactttgggaggcagccctggcaggaatttttatattttgttttactttgcagctgagtaaactgaagctcagagctcatgtatagtggaattggggcttgactgtcaggcatctaacttgaggccacaaatatccgtgtaaatgtttgactgacttaccttcatgctttgagattattttaatacggtgatgcttgtgacctgtgtctgttggggcttagttccttaagaatcctgattgaaacagtggcctgacacccagcagagatatgggtaatgtacacacaaggattcccaaatgaccaagaaggaaagctctgtaagggagtattaattgtttgcctccaggatcagtattcattcttggatcaaaccccagctccactgtacaccagccacgtgatgctgggtgcttcctcatcatctccacatgtccttttgccatctgcaaggggaggatagtaaccatgactcatctcacagggtgatgatgatgtgtacatgagatattgcaggtaaagatggagatgagaagcgtgaccagttattgtgactacaggatgaaggggctggtctaaccttgagcttgcgaggaaagcagagtaaagatgcctgctgaccctggacaagggttttctgctcagaattgtttgtccacttcaggtgggttcttctggccccctgaggcaagtgtgtgcactgccacagccccctttctgatgctgcatttcttcctctgtgaatggagagattctgaattcattgaatgcattttcatgatgtgatactttaggcctgcgtaccaggaaaataaatggtcccaaccacagttagctcctcgacttgcaggggaaggatgctgagtggaaagtcacrttgggaggtagtcggggctacaaaaggggtacaagtcaggagaggttgagcccagaagggagtctcagagaggtcaggctgcgtaagcagactcgaaattttgctataaatgtgagctttgaaaaatgataatcctgccctgggaggagtagtaatgtctccttctcttagtgatccacatgaacctccccagccaagacctgctggtccagaatctaagacaagagaagttcggggaagtgaggatatgaggwgaaacgaatgagaactgttttcacgtgcctgcttgagccagcacgactgcatcctgccttccctgagagacatgctgagagacacgctgcttccatcagccgctctgtggctgttcagcaggatggcgtgttcagccggggagtggtgtgtcatcaacccaatttggcagctgaggcaatgaacacagagccaggaccagamgacctgggggcatttttactcttgaaaagaacttagacattgatcaacttaataggctcatttcatggaagaagtagaaatgcagaaattgaaaatcttgccctggttcatgtagcctgtgggaattagaaaccatgattccaggctcctggccacctctctttccatggagggccccttgtggggatttmttctctagaatgggctccctctgaccacattttgtccatgtgtgaaatccagcatgactgctgatgccttccatgtgtgagtggtggccgtgggcagtgcctgatgacctcatctgatggacattcttttccgtcctcctcctcacccctctcccataacccgggtgcagaaacattcaggacattaaaccctgggaacctcaatttgagataagacctcttatgtcctgtgggtcaataggagtgactcaaacgttatgagaagcacatggtcgcagggcctstgaggaccacctcagcttggggatgagtccttagttaagcttatgcttgatgttgcaatcttgaacagaaaagggggatgagagaggagagaggacagtagagaaagggggaagatttattttaaagaattatatttaaggaatcaactcacacgattgtggggatggcaagtctgaaatctgcagatcaggccacagactggagaaccaaggaagagctgatgttggcatcggagtccaaaggcagaattccttcccaatctatgccctcacttttaacggcagatggtctgcaaggttgggaattcaatttgcattgtaattcagccactgccaggatgagatcctacttctggttttcagccatctcagctctgcatctatgggacataagggcagacatagaaacttttgattcattcatgtggtgcttgagctgggaatttgaatccctgaattcattcttcttttttcccccactttgtctagtacaattaggagcaaccaaccactctcgttatacttgttaattttacaaaaatgtttaaggtatctgctacacacccacctagaaccttgcctcttagaagcctttgggagtatttaataatattttctgtgtctctattgtcccatcatgccctgtactctcctctttttactactggacgtagaatcattagtgcctttcaacccaatcagatctgagaacgaatttcagaaacctcagaacccattcagaaaactcatttttaagatgatgttcttctagaaccactcttgctacgaaaacctgacagcacagtccccaggctgtttgttagggtctggcatraattcttggaaaggcaaaggagaatggtgagagcgtgtgtaactgtctgtctgtctgtccatcccagttggttttcactgtgctttggtggctgcatatggagctacagatactgatttcccacagttcccactttggatttgttctcctgcttctcgtccatgggaaatgactgccagagctgggagctatcaagcatatttaaaccgcagccttccatttattcttcatgaatgcacacgggccccagactggttgtaaataagcaccagctcccatcccctgcagttcttggccttatagagagcctgccagaggctggcttggtcacatccttcagtttagactttacctggagaagaaaatcacaaaggtctaacgggcacccagatagcatcagcagtgtatttagagaagtgcagaagggccaattaagcccatttcgtggtttattattattagtggtaattatttctggcatgcagttcaagggtgtctgtggcctgkctgagctccggaagtgcatccacagcaccctcctgtgaatgtttatagacccaggaggggagccctgggttgggagctccagaccactggggatgggaggcagagactctatgtatagatcatactcttgtggaggtagaggcctggaacatgatggctaaactcctgtcgctgattctgggctaagaaagaaagaaaatccaaaagacagcaaggacctctgaatccctgagggaagttgaacagagcaaagtagaaatgaaccacaggatggctccatccctcccctggcatccactgcccctgcccctgaatgtccctatctttgcttagctgtggcccagaagtccactcagcctttgtctaaagaggcaggttctgctcagcagtggcgttgagagctcagaccccattttgggttttctagaggcagaaggccaagttcattctcttgaagtgaggtagatattcctgtgcacagagagaaggggaatccagctcctcatagagcagctccccaccccaagctgagttgtgtttcgcagggagagataagcctgtggtcagcagcattcatccccatggtattcaggccactttccaagaaccagcccctccttgtacttaagtttctagaggcagggccgaggagcaggcacagggagaggatgagcgtcggcaagttacaggaaactcaggaaaatgtttatgtgtgtccagggattttcagagactatccagccattctttatctccaagtgcctctgctctcatgaacttcttcatgtggacaaaagcaggaagcctttagggccacgcatctcttgttttcctgtgacttacacagccctcacctttgtgcttagatggactgtggccagcgggacctccaggcctggctgggtcaggagagttttgcttaaccagatctgtttgatccttgaaccaaaagcggggagccagagagatcctttgagaactgatgactgctgctgggtcctgcccagccatttgcattttataaaggtctttggcagcggccaaggccttctcattatgtggtgtttttccacttygggatgaaccggagtggtttgtgcagccrcctgatagctctttgcaccagcttctgcatgggagactttgagcaggccaggagccaaggggaccctcctaggccttccgagcacctagcactggcccttttcttcctyggggcttccttctggaggaggtttccctgggtttggagtcctccctcctgctgggggtgggggcgtggttgctggtggcctggagtgagctgcctgctgtggcctccagcactccccagctgaacagcgagtcctttgtgaaattcctgaggcaggagggggcagctgtgcagagccagctctcagagtggccgacagggagggtgttgtggtgtatcatcaagtgataaggccttcggaaaggctgtggagaggaaggaaaacacattcctgactgtggtgtgtttgcccttgagggccctgtgtttggggaagtagagaagcttggctgcattgttgtggggtgggagttagccctgtgctggggggagctagtgagagatgaattcagctgacctgggatcaaattccagcttggatgcctttaattaataacatattagaccatttaatcaatttaacacacgtttttggagtgcctactatgtgcaggcaggtaaatgatcttcaaggtgtctccatcaggtggaaagtcaaaaattcagaactgggcaatgactggaggggaggatgggattctcaggtgaagggtgtgagacccgagttgtgttttggacgatgttaaaggaggagatcagcttccagtagtgaagagcatctgatgctttggtgaggaggattttcttttaagtccttgaatgcagaagggctcctttggaagattttatgcaagagaatgccatggaaagattatattatagtggatcactctggaagtgtcatgcggaatgaatggagaggtaggaagcggggttgggagagcaaacgtaaatctaaggtccaattgggaggctctgttggaatgagctggcgagagatgatgagggcctgatttaaggaacgattgtattgaaggcactaaggtattggcattcagcgaatgtacatgagtctcaactttctggtttacatctgaatggacagagaagaggacatgatctgagcatcagggagttgatgtttgtcttggacattgcattaatatagttaggctaggcttccagaaactctgaaatcccagtggcataatgtccagtttgtttctctctcacagagtcagctgtgaagatggtggctgtaacggacagcttcttccaggcagtgactcagggatccaggctgtctcttgaggatatctggggggttatgtatttgccctgaaatacttcgccctggtgatgtcatgtgtgatttcctcccgcagacctttagtcagagctagacactgtgaagggctaggaattgtgaaaagattgtgtgaatgaacaggaaggttaaatttgaggtgccataggccatgcataaagaacagtccagatggcacctgggaccggatgcctggacaccatccgagcaggagattaatggaattgaaaatcagcaacgtaggagacagaagccttcaggatgtctgggatcctatagggagggtgtgttgtttgaagagcaggggctgaaggtggaatcttggggagctcatgacaggctggcagaggtactgaatttctccaagtctcagtttcctcatctgcgagatgagcctgatatttcctataaagggatagtgagtgcactgggtgctgctgggcaggcagtggctcctcataggggtggttcccttccccctgcattgtgttggactgaaccttgtgtgttctgtttgtcaggaactgtggtgtatggcgagcccatcactgccagcttgggaacggacggctcccattactggagcaagaactgggccaaggctgctgcctttgtcacctccccacccttgagccctgatccaaccactccagactttctcaactccttgctgtcctggtgagtcctggcgacttgttcacacttcacattctgtctttcttcagaccagactgacctgttaggcgaaaacaacatggtggccaagagcagccataaaactgggagacccttgttcaccaaactaggttggctacatgagtacagggaattgtcattctagcaccattttgggaggggattctggataaaaacctgggccatgttgaaagtcaagccaagaagggagaggaggcgtcraaaggactccacttgggttggtgtgatgccattcatgagacagcccaccaaataggtgtaggcgcacagcatcttgacgaagctgcagcaccacgttatgcattttctttgcagtggagacctccaggtcacgggcagtgcccattgcacgtttaacactgcccagaaggctgtaggaaaggacaacttcaccctgattccggagggcaccaatggcactgaggagcggatgtccgtcatctgggacaaggctgtggtaaggagcgatggcctcactccttggtggctctcagccttccttgtcctcctcatctgggggccatggggctcatggaggccttgaaatgacagacagtggaggacatcctagaagccagtacttatatgacaatatttctgagggttggaaatctaagacctcttctaataggtcatttcttcctaaatattacatatatatttctttttaaaacaatttttaaatttttttcagacaaggtcttgctctgtcaccaggctggagtgcagtggtacaatcatagctcactgtagcctcaaactcctgggctcaggtgatcctcccatctcagtctcctgagtagctaggaccacaggctcagaccaccatgcctggctaattttttttttattttttgtggagatgggggtctcactatgttgcccaggctggtctcgagttcccgggtttaagcaatgcctcggcctcccaaagtgctgggattacaggtgtgagccaccacgcctggcttacctgtatatttcttatcattatcatcaatggaacagtaaagactgaaaacctacacagctttagatgtgactctgggtcagtcaggaacaaacttccttagcaaccaggtgacttactcagttaatcctcgtctactcttggaaatgggctcaatttccttaaaagtgtcttttagggctctctggacttagcatgtcttctactgccagcttcyagtaggcctgctatgaacatacactgacctttagaggatctttgggctttttcattttaatgttttaaaatatattaacagaataggttttctgttttttagtgaattgtttagattatatgaagaatatatccttatttccagaagaataaggaagtaaataaaagtcactgtgtttcagatataaccacaattaacattttggcaaatgtctttccattttttgctactacacaggcacacacatgtatatgtgacatgcgtgagtgtgtaaataatattggcatcatacagctgggcccactcccaggttcatgcctataatcccagcattttgggaggccgaggtgggtgaattatttgagcccaggagttcaagaccagtctggcaacatggcaaaaccctgtctctactaaaaatacaaaaattagtgaggcatggtggcaggtgcctgtagtcccagctactcggtgtgggggaggcaggaggatcacctgagccttgggaggttgaggctgcagtgagccatgactgggccactgaactccagactgggggacacagtgagaccctgtctcaaaaaataataataataataatattggcatcatacatactattttgtagtcttttttaaaaaaaattttatcatggaaatatctccacctgcttaaatatacttgaaaaagttgatttataataacagactcttccatgtgagtgctaaactgggactcatttatttatttatttatttgagatggagtctcactctggagtgcagtggtgcgatctcagctcactgcaacctccgtctcccgggttcaagcgattctcctgcctcagccccctgagtagctgagattacaggcgtgtgccaccacacccagctgatttttgtatttttagtagagacagggtttcaccatattggccaggctggtctcaaactcctgacctcaggtgatccacctgccttgacctcccaaagtgctggcattacagatgtgagccaccatgcctggccaggactcacttataattctttttttttggctgggggagacagtttcactctttccccccaggctggagtgcaatggcgtgatcttggctcactgcaacgtccgcctcccgggttcacgcaattctcttgcttcagcctcctgagtagctgggattacaggtgcctgccaccatgcccggctaattttggtatttttagtagagacggggttttgccatgttggccaagctggtctcaaactcctgacctcaggtgatccacccacctcagcctcccaaagtgctgggattacaggtgtgagccaccacgcccagccacatttatgtctttggttgaacatttatgttgtttctggttttttttttttttaacttgaatgacatttttataatagacacattcttgattatgtttgtaggagaaatttctacaagtggcattgctgggtcaaaggatgcatatatttttaacatttttggtacatattgtcaaagttccttccagaaagtttgtactgctttatacgccaccaccaatatatgtcattccccagtgtcttctaccacctgggtgtcatcagcaaagatccattgtttgctgatttgataggtgaattttgtgtctyattgttttacatttaatttattcaattactgattagagtgaaaattttttcctatgcttagtggccatttgtacttttttctccctcttaataccagcttatttcctttgaccagttttttactggatttagagtgggtttgggaggggaagcacttgaggaaatgtgattggcacctaaaaccagatgtggggcggagacttctaggttggctagactagaagatgacatctggccaggcatggtggctcatgcctgaaatcccagcactttgggagagcgaggtgggagggttgcttgagcccaggacttcgagcccagctgggcaacatagtgagatctgtctcttaaaaaaaaattagcctggtatggtggtgcatgcctgtcttcccagctactcaagaggctgaaagaggaggattgcttgagcctgagaggccgaggctgcagtgagctgtgatcactctactgcactctagcctcaatgacagcaagaccctgtctcaaaaaaaagattaaaaaaaaaaaggaagcctagatctgtggctgtattttgttgaaaaggacagccaattgggccaaatgatatttcctaaagagggattgccacccctgcaaattaaacgaatttttttttgttttgaaataattatagattaagaagcagttgcaaagatagtacagagagaggtcccgggtacccttcacccagtttccctcatggttacatcttatataaatgtagaacaatatcaaaaccaggacactgacagtgtcacaatgtgtgggtatagctctaggctgtgtggccacctgtggagtcatgtgaccatcaccacaatcaagatgcaggtctagtccagcatttcagagaccaacctcttgctgctcctcccctccaccctccctaaccctggaagaacccatctagcccctcatctgttctccatctctaccattttgttatttggagaatgttatagraatggagtcatacagtgtgtgacctttgagacggtttgtgtttcacttggcacaacgctcttgacatccatctaagctgtcgtgtgtatcaatagtttgttattgaaaagtaactttttaactcgtttctgctgtgtgcctcctgtgcacacctatgctgtctccctcaggtcactgggaagatggatgagaaccagtttgtggctgtgaccagcaccaatgcagccaaagtcttcaacctttacccccggaaaggccgcattgctgtgggatccgatgccgacctggtcatctgggaccccgacagcgttaaaaccatctctgccaagacacacaacagcgtaagacctgttaactgtgcagaccccatccaaacgaattacagtcacagagacacagacggagggagagccccagggtttctaaaaagaacttgctgtgatgggaatgcgctcgactgaggatgttatgatttkcaatttgctgggaaaagaatagttatttcattttctttagtgaggtcaataagattgttactctcayaatcattttggaataccacagcctctctatctatagacctttagagcctctaaagtgatgtcaggatgtgcaaagcttccagaagtcaggcaccgctccattttcataggttggcacagcacttctcatggcagtacttggtgcaagggacctcaatgaagcagtgagatgtcctctcctgagatgcccactggggactttgatcctcttaagccattgttttctcaggccagtatccatgcagaaaactggatgacagccattcttattatcttaaaggaattgattgactgacttctccctaacagaagtaccccccagccatttgattgttgttttaggatctgccgctttgggtatctcttccctctgggtctgggctttagagcttagagatgtcctctcttgttaacaggacccagggcaagtctgttaatgtcttacgctcctcagctgagagtgaggggttcagamgaggtctccaagtgtcctgtgattctgtgaggtcagcagacattaagcagagttgttagacactgccgattcctcacaagcaacatggtataggcagaaaaactgaaggaatatgcccagagggagagctttggaaaagaaatgggcctcgggcagaagagtttcgtgtcaggaactcatttgaatcttgaagacagctcaggccagcaagcactgacacctcccccacacaccacgacagcttagggcaggtttctggcatttctccgggacaaccctgggactttgccctgtcccagtcctctctcatttgcacacacagaggtgtttgggctgcaatgggctcaggctcagctctggcttctgccacctgtgaggaccagggtggtgggtgtttctcagaagactgttcaagtctgtgtttaaagctgtctttctccctctcccaccaccactcactggctcagcctggcagcgcagccttatgatcgcgccccttacagcccagatcatgacttcttgggtgtcctgactggctattttatggtcagggatcctagggccctgccccatgaacctccctattcatgtgcctgtaacttcacattctcattgactctttcatttgaccttctcaataaagggactggtattattatcccaatttgggaaaataaataaacggaggcttagagagcttaagtgaccagtctaatgttacatagcgattttgcggttgagccagaattagaacccaaaattgttcaggactcttccctgccagactgcatatgcagcctcttggtcaggcttagacggggaaaatgcttcccctctcttgcaaggttgcttcccccagaggtgctataaatggctggctgggctcgttatttaagacacaaatgacctagctggggaacttgcatttggagttcttaacctagaagacgagacagtgggaaggagagaagatttgggaagacagattctgccctccagacattttcaccccaacctaccctgcttttacctccaggtgacctatggaagaaatgttgactttcaaagcggtgcttttccatccccacctgttttaaagagccagcactaagcatgtgcctgttcgttcatcttctgggaaaatgcaaccaggagactttccctgcatagtacagtgtttcctaccatgaggctaattagctttagttcagagcatctagctaactattatcgacagccctgttgctaagcctttgcttggattttccaggcatctggcccgatgagtaattttagggagcctgtgtggatgtaggttaaaaatgtctatgcatggtgagtgaggaagcctccctgcatcatggtttgatggagagtaggctctgagtatctgggaattgtgatctgacccttggacttgtcaatgttaagtcactgagagtcatggggctggttcttccatcttttaaaaatgatagatggccccagaggtcttctaggtgctcatttataagcaacaagactcaacgcatgcattgtgtgagatcttggatgctgcagggctggcaagtgttagcaaagtgcaataaagagccagacagtgaatgagtgaagattttctaaatgcctactgtgagccaaatagtgagctagatgcttttgttcattttatttcatttgattctcacatgagtcctgcaaagggggacctacttacccctcacagatgaggaggtggaggctcaggggtgtgagggatgcatccaaagtcacatagctggtgaatggcatacctggggtgtgaacccagggcagatgtctccatggccgaggctgcgcccatactctacccagtagggcacaagaggaggttgtcagggcataaactgttagctgtggagtgatgtggaagagatggctcttgatccaggccttaaaggatgactcacaccctttcaaaggttgtttctgagatgaccagggatgaggctttttgtattgtcatcttcacatacacctcgggagggtgcagatgaagaaactgaagctgagacaggattaaagcaatctccccagagtcacacaacttctggattttaccgtatctgagatgccatcgattttaagatattccattaggttatgtaccacgatgaaagaaaacatgcccaagacgaggagtctcataggagactgggccaccaagggccagcgtgtgcttattatggcatctctggggagaccatctgctgtgcagacaggggtggcagaaaatctcgcaggcctcgaccttggcattggttgccaagagggaaaaatgtctcccccaagaattggaactggaagtgggtgcttgtccagccttgtggtctgaatgcatgccgcctgtgtggtccagaacaatgtcaagctgagaatttactgtaaaatgccctcagtggggttgtcccccaacccagtggcacaaacaaacccatatccccctagaagaacttggatttagtctaggctggcagtacccgcgtggctccggctgctataagacacattctgacttcagggatgagtgtcttagaattgatgaaagacaattttaagtcttgggtctcagtaatccaagtgcagagtcctcttccctccctgctggcgcctctctgctatggttcctttggtagcttctgcatgactgctttgagactcagagcaatgtactgacagccctcgtggttgttttcacccaacattgtatgcggggcattgtgcatttacatgccygatgtgagctgctgagctggccgaatccgtgttaccagccgctgcactaagcagaaatgtcatcttgaactgcagggtgctagcacagctctctgttcagaggccagctccctgagtgctgataacctggtctgaactttcccagaagcccagggtgctttttatggttggagcaacctattaatcctctagtccagactcagccacagccattggtccccgtgaaccaaacaggcaggaagaagcgggaggcatttgggatctgggaagtagcactgggttagcagaagctgcaggatggaatgactcctgtgcaatgactcctgtgttctgttgcttcattaccaaccacaaactcacatccatatggagaccccacctattttccaagagggcacacagatatgtctctgttttacccggaaaaacttgaaaccagaaggatagctacatagctacattgttctggaaattaactagccctcaatcattttatcggaggcatgtctcttcagtgaccacaatcctttcatttagggacttcagtttaaccacaccgcaaacagactrgaaaaccaggctagccagtgggaaaacctacttgtggatggctcatttcaagattaaatttagaacttggtcagagaaggcctttggaattcaaccggaatggagctggagatggtgggaacacagtctctgttaataggaagaatcattttctttatatttgtgtagcatttacaaacatgcacccttttcacacaattattctgtttaattatttttctttctaatgtggagaggtagaaaaagttatttcatattctagacagggaaatggagacacagcaagtaagtgcctgctggggtgcccagttgggacaggatccctgtctctgagtctctcttttgtctctgtggggttggggcagtgggtgctgccgggtggattgagtccagccagagtggcctgttctagagtttactttgccttcttctcagtctctcgagtacaacatctttgaaggcatggagtgccgcggctccccactggtggtcatcagccaggggaagattgtcctggaggacggcaccctgcatgtcaccgaaggctctggacgctacattccccggaagcccttccctgattttgtttacaagcgtatcaaggcaaggagcagggtgagtagttttgttctgatgaattttttgttaaatcacgaattaagttcaaggccacaaacatttattaagcaccttgagacagaatattaagatgaatttagtggattccagggataagagggagcctgaattttttattcctggcatttaaaatactggagaaggagtcagtcgtgtccacagagagccctagcaaagtgagatcatggtatatgctatgataaggagtgtggagtaaggacccagaggagggagccactgctgtagttggggagagtgtcatggggagaggacattttgagttgggctttgaaggttaagtaggagtttgtcaartcaaagaagggagatgagggaatttgataagagtatcatgagcatagaaaatgtacagtgtattcagggcatgtgaagcaggaaagagatggagctataagggaattaaaaggagagaatgcaattggaaagaaagtttggggccagatcttgaacatgataccagatccgcctcacagcatgcttaggggattcttacagggtttaaagttgaagtgtcttgggggaaaaattgtaaggtgtgttagtttttgtagagttaaccagttactggaccttgtggggagttttggcctggcatggtgggagctggccccacacaacacctgtccacctgtctgtaaggagagccctccatccctagatctcacaggcccatcctccctccaggagggtttctagagaggtatcctctgtggctgtggcctgagctggggggactcttgtgttttgcagctggctgagctgagaggggttcctcgtggcctgtatgacggaccygtgtgtgaagtgtctgtgacgcccaagacagtcactccagcctcctcggccaagacgtctcctgccaagcagcaggccccacctgtccggaacctgcaccagtctggattcagtttgtctggtagggttggggcttggggagggcacagttctgcagggccagctcgctggtgctggcgaggctacagttgcatttggaaaggacacagaaatagaagtgaatgatattccctttctctccaacgtgagaaatacagtggactcagatctctggagatgtattttctttttcttttttttgaggcagggtctcgctctgttacccagactggagtgcaatggcacgaccttggctcactgcaacctccacctcctggttcaagtgattctcatgtctcagcctcccaagtagctgggattacaggcatgcaccaccatacctggctaatttttgtatttttagtagagacggagtatcaccatgttggccaggctgatagaactcctgacttcaggtgatctgcccgcctcggcctcccaaagtgctgggattacaggtgtgagccaccgggcccagcctagcttggcctggagatgtattttcatagttaatgactggttgggtttcagaatcttgagatcagtttgtgtcacacaatgcccatactgtgttttacctaatatattaagaagacatttgttcaatttattaggtccatcataagaaaggacactgtggtatttcaggacttctcttctctcctacagtatattgtagtttagcttgtggagtttggagtttcaacagcctaacttcagggctcagctctggctgtgcttcagtctcctcacctgtataatggcaataatagtagttgctcccccgtgaggttgttgtgagggttaaatgggttaatatatatgtacagtgcttagaatggggccatttgagaactgttagttgtatttgcttgggtaatttgtgtgatatccccttggtgagaggaaagggttcagatttttaagtttccttgcttgaaacttctttcccatctttcatttgtcccatgactagaacattccactcttccagctccctgggccacagattcctatggcgtattaaagaaattgttaaaccagagagaattttttttcttggtggttgtatgggtttttagaaagtaacctatgtcccatatatggattaccagttttcaaaacatttaaaaataaggaactttactttgttgtaagtaaaacgtgtataatcatgtctgtgttttctgatctctcaaagctgttccaatataaggtgccatcgttcctcctacttgtgattatatgtgtaggattaggggattagaatgccagaagagggctatgtcctcagaaaagccacagccaatttgactaatcagaacaggggacaggacagagtctaagatgtagtgatattttgtatatagttttactttctccagtaatagatccaacaacctttatacagtgtctgattctttggttaccttaggctcatctcctttttaaaaagtttatttttatttttagagatataatagtatctcactgtgtcacccagtacccaggctagagtgcagtggtgcaatcacagctcactgcagcctcgacctcctgggctcaagtgatcctcccagctcagcctccccagtagctggtactacaggcttgcaccatcacgcctggctaattttttaattttttttttttgtagagataggctctcactgtgttgcccagactgttctcaaactcctggactcaagcaatcttctcacctcagcctctccaagtgctgttagtaggattccaggcatgagccaccatgcctgctctccacctcccttctgtagtctaaacttcagtgaggttttaagagaagaacaaagaatgtgaggccgggcagggtggctcacacctcttatcccagcactttgggaggcagaggtaggaggattgcttgagcccaggagtttgagaccagcgtcagcaacatagcgaaacccctctttacaaaaaatttaaaaattagctaggtatgggggcctgtggctgtggtcccagcttcttgagggggccgagtgggaggatggcttaagcccaggagattgaggctgtggtgagctatgatggtgccatagcactttggtctggaaaacagagcaagacgctgtctccaaaaaaaaagaatgcgactagcacttttcctcctgagctgtgagatttcaccttcaagcaggatcttgtgtgactgtcctggcccctcacccgctcctctcttctcctctccctccaggtgctcagattgatgacaacattccccgccgcaccacccagcgtatcgtggcgccccccggtggccgtgccaacatcaccagcctgggctagagctcctgggctgtgccgtccactggggactggggatgggacacctgaggacattctgagacttctttcttccttcctttttttttttttgtttttttttttaagagcctgtgatagttactgtggagcagccagttcatggggtcccccttggggccccacmccccgtctctcaccaagagttactgattttgctcatccacttccctacacatctatgggtatcacacccaagactacccaccaagctcatacagggaaccacacccaacacttagacatgcgaacaagcagcccccagcgagggtctccttcgccttcaacctcctagtgtctgttagcatcttccttttcatggggggagggaagataaagtgaattgcccagagctgcctttttcttttctttttaaaaattttaagaagttttcyttgtggggctggggaggggccggggtcagggagagtcttttttttttttttttttaaatactaaattggaacatttaattccatattaatacaaggggtttgaactggacatcctaatgatgcaattacgtcatcacccagctgattccgggtggttggcaaactcatcgtgtctgtcctgagaggctccacaatgcccacccgcatcgccattctgtagtcttcagggtcagctgttgataaaggggcaggcttgcgttattggcctagattttgctgcagattaaatcctttgaggattctcttctcttttaccatttttctgcgtgctctcactctctctttctctctctagctttttaattcatgaatattttcgtgtctgtctctctctctctctgtgtttcctccagcccttgtctcggagacggtgttttcctcccttgccccattatcttttcacctcccaggtctaccatttcatggtggtcgttgggtccgcctaaaggatttgagcgtttgccattgcaagcatagtgctgtgtcatcctggtccatgtaggactggtgctaaccacctgccatcatgaggatgtgtgctagagtgtgggaccctggccaagtgcaggaatgggccatrccgtctcacccacagtatcacaygtggaaccgcagacagggcccagaagctttagaggtatgaggctgcagaaccggagagattttcctctgtgcagtgctctctggctaaagtcacggtcaaacctaaacaccgagcctcattaacccaagtgaaccaaccaaagtcaccagttcagaagtgctaagctaataggagtctgacccgagggcctgctgcttcctggttaagtatcttttgagattctagaacacatgggagctttttattttcggggaaaaaccgtatttttttyttgtccaattatttctaaagacacactacatagaaagaggccctataaactcaaaaagtcattgggaaacttaaagtctattctactttgcaagaggagaaatgtgttttatgaacgatagatcacatcagaactcctgtggggaggaaaccttataaattaaacacatggcccccttagagaccacaggygatgtctgtctccatccttccctctccttttctgtcacctttccccctagctggctcctttggacctacccctgtccttgctgacttgtgttgcattgtattccaaacgtgtttacaggttctcttaagcaatgttgtatttgcaggcttttctgaataccaaatctgctttttgtaaagcgtaaaaacatcacaaagtaggtcattccatcaccacccttgtctctctacacattttgcctttggggatctggttggggttttgggttttttgttgttgttgtttatttgttattttaaaggtaaattgcacttttaaaaaaataattggttgacttaatatatttgctttttttctcacctgcacttagaggaaatttgaacaagttggaaaaaaacaatttttgtttcaattctaagaaacacttgcagctctagtattcacttgagtcttcctgtttttcctgtaccgrgtcatggtaatttttggttgttttggttgttttcttaaaaaacaagttaaaacctgacgatttctgcaggctgtgtaagcatgtttacctgttggcttgctttgtgtgtctgttaaatgaatgtcatatgtaaatgctaaaataaatcgacagtgtctcagaactgaataactgcagtgacttgatgctctaaaacagtgtaggayttaagaatagatgrtttttaatcctggaaattgtgattgtgacccatgagtggaggaactttcagttctaaagctgataaagtgtgtagccagaagagtacttttttttttgtaaccmctgtcttgatggcaaaataatwatggtaaaaaacaagtctcgtgtttattattccttaagaactctgtgttatattaccatggaacrcctaataaagcaaaatgtggttgtttcaggggtgtgtctgtattgagatgttcgggaggcggctgcttgacttgggcctccaaccagacttcccctccacaagcattcacggagccctcggcttcagtttggtgaatataccaattcaagagttttcactccatgtcacaggctgctacgtccaggccacgggattctaattctaagcaaagatgcagcctgcgggtgcatggcaaaccaagtgtcagaaattcacagactctatcctggagagccctccagaatcaagctgcatactgaagcttgaaactgggaatggggtgggaccacatgctttcatgtgggtgacccctctgggctctctgcttccttccagcttgtttaccccggaaaatcctccagcatgaaagataagaggcaggtgtgttggcccttatccacacctcagtccggaaacttgtgggaaaccaggttataaaggcttggtcttccactttcatgcaagtgtcaagaatgcactttggccaggagccccgcccaccccagcagtccagatgcttggtttccgtggttaccctgataactggcactcacattattgattctgagaagactgaatgaagagagtgtgtgccttgggccccccaggcctatcatagggttgatgaagtcattatctttttttcccttcctcctcccctcttttttttttgagacagggttccactctgttgcccaggcttcagtgcagtggcacgatcttggctcactgcagccttgaccccttgggctcaagcgatcctcccacctcagcctcctgagtagctgggactacaagttgcacaccatcatgctcagcaattttttgtttgtttgttttgtagagacacggtttcatcatattgcctgggctggttttgaactcctaggctcaaacagttcacccacctcggcctcccaaagtgctgggatgatagatgtgagccactgcagccagcccatttttattttctgtccagccctgtccaaacaggatatgaggtgacttatacaaacacatacacagtgccacagtttataaataaagagtgtttgggtaaagggaaaataagagcaagaaaaataagataaggccttgcaggggttagcgtgtgacacctgccacgaggctgtaaacttgttagcgagctccgagtgtcctggcaacacgtacacaaaagggaagtatggccacttacaacacttacagtgaccagaaggtaaagaagataaatgagtccttcataaggaatacagcaaatcctgggaaccacagtgttgagcgtctggggctggctcttacctgcctttcactgcatgctgatggcagagcactgtgaaccagtcaaatcgagtctgtccacaagaaagggacaaaaagtctcaccttaacattgatgggacctgggacaagagttaacatgaagcctccaggcccacagcccatcctcctattctcataatggcttcatctcacaccaagatgggcctcatgcccatacctgtggacactgcagcccacgtgtccaagttccatccaagcccagcaaacagctgccccgtgaggtgtccacagcagctgtgaggtcttccctccaaagaatagagccagcacagagtccctcttaggtccctttgagcagggacccaggtaccaaagctggcctggaagggctctggttggcaacatctcactgacccttgggaactcctcactctgtggtgaaaggcatgctggagggggcccagagagagggcttctacaggtagaccagcctcgaactcctgggctcaagtgatcctcctgcctcagcctctcagtctccagaatagctaggactatggatgcgtccaccaccactcctgtcaattttttttctctttgtagagctgggggtctcactatattcaggagttcaagaccagcctgggtcttgaactcctcctggcctcaagctgtcctcctgcctcagcctcccacatgtttttaatgactattattccactgtctcttagaaagctcctatttagaagggtgtgagcaaaggggacagggagtgttagagaataagactgagcaggtagtcaggcaagcccacaggagaaaaatgtgggcaaatgagagctttgcagaaaagagtataatgacctcaggaagccaacacaaatttggaaatagtggggatctagttaagaagaaatgaaaaagcctataaaatagacaagaggaggagtcaggagaaaaatggcctagaggaggacgagacaagtaaaggaaagcaataataatctgagtgcattacattttttttttttttgacggagtctcactctgtcaccaggctggagtgcagtggcacgatctcagctcactgcaacctccaactcccaggttcaagtgattctcctgcatcagccttccaagtagctgggactacaggcacgcgccaccatgcccagctcatttttgtatttttagtaaagacagggtttcaccatgttggccgggatggtctcgatctcgtgacctcatgatccgcccgcccggccaaagtgctgggattacaggcgtgagccactgcgcccggccaagttttatagataagaattgagaaaattgtgttgatttggcaaaaaaattacaaatgtgtgtctatacacaaacgtatgtatgtaacttttataaggatctcaaaagaataaataaaataggccggrtgtggtggttgatgcctgtaatcccagcactttgggaggccgaggtgggtggatcacctgaggtcaggagttcaagaccaggctgaccaacatggcgaaaccccgtctctgctaaaaatacaaaattagccgggtttggcggtgcatgcctgtaatcccagctactcgggaggctgaggcaggagaattgcttgaacctgggaggtggaggttgcggtaagccaagatcgtgccacttaactccagcctgggtgacagagcaagactccgtcaaaaaaaaaaaaaaaaaaaaaaagaataaataaaataatgtctgaaaattctttgaggagggacaaagggacctagacacaaatgcatcgtcattttactaagccttggtatcaggacagggcttgggcagacaagaagacaacaggcaggttgtctagcagtaagtgtcttgttgaggccatgaggcgtggggcctccactcagggcgggacagaacctgaggggcccgtgggagaagcactggggggttgacaaagactaaacacaagagcttataaagttctacggttcaaacaacttattacattgagtttattcacgtgattagctttggcagctacacctcatccctgccagggatcacacacagtcctcgtcctaacgaacatctctgcaccacacaggaccatccagccaacctggcaagtgcaacgggaacagggttgtgatcacagaggatgaaggcgaggtctcccccagctgtgaccttgcccagtaccagctttttgcagctttatcctgggactcttgggaccccagggaccctggaaaacccagtgtggacccctaaggaagaagtgggcagggaggggggaactccctatttcgctgcctacagctccttcaggatcaatgcctcctcctcgaagtccagatgtgccgtggccttgacactgaggcttcccgttactggcgggcgtgtctctggatttttcctgtctctccaaagctgtccatctagtcctcggtgagcctctccccagcggccccagggaagcggcccacttggttcaacttctccgtagggctgagctccctctgctggagacacacacctcttacctttttttttgttttgaaacagggtctctgtcgcccaggctggagtgtagtggtgtgatctcagctcactgcaacctctgcctcatgagttcaagcaattcttctgcctcagcctcccaagtagctggaactacaggtgtgtgccaacatgcctggctaatttttttttaattttatttttaggagagtcggggtttcaccatgttggccaggctggtttcgaactcctgacctcaagtgatccacccgcctcagcctcctaaagtgctgggattacaggcatgagccactgcacctggccttgcctctcaccttttattatggattccagcagttagtgaggaaarcaccgcatgctagtccaggactgcgccatctcttggttgcatccaagaccctatctctcaggagaacaaggaggaattgtgagaattcatgcccaggcctagctgcctagaggcagagagaagggctctcagcccgatccccaactctggccacttttctcrcccactccctcccactgcgcccacttttgacatcctgcaccaccagtctcttgtccgttcggttttctggtcgtaaacctccacctagcctgtcctccgcaccccaccaggaccccatggcaggtacttcaactctctcgcgagttccctcagtttccttgaacccatgtcttcccactgtgaaaccaagaggtgaatctgatgaggtcccccactgccagcctgccctgcttgattcggtcacttgcatattgttacttttttccccaggtagctgaaggctgcactgcagaacactggaacttaaccctgctggcttccttaaggaaaacatttatatgtcaccatggtaatggccgcttaagttatttttcaggaatctggggctgctcctgtccagttcaaaccagctgaaatcacttactgacccttcaactgggcctgtgcaagtgcccaagaggtggctttttgatgtcagaaggacaaaaactccatcctcagatatgctaataccaccgttttctgaacatgtgttcagtgaagtgccatgaaccccaactacacttgtgcagagcactaattacttcattcccccaactaccagtcacctctgcctatgccttagaccatcccactttgctaacccacacatatccctaagccttattttggggaggtgaatttgagagctgttctcccacctcctgactaggctgccttgtgaataaatcttttctcctttgccaaacctgctgtcacagtgattggtttactgctcaagggcagaaccaacctggtcagtgtcaactgtacctgtacaacaactcccccagccatagtaggttgcaggtcctgcctgctctgtcttaatccagagcaccaactccaaaggacagggacagcctgtacagcgaagaatcttctgactcttgcttgattgctccctggtgctagacctgttgtgccagaacatgaggaatgggaattcatgacccagccccagggcctggcctccctcctggccatggctaaattctgtgaggccccagtgccactggggctctggaaatccagtgattgcaccttgtcttcttttctcagttgtcatctacatattgtccctctgggcatctgtcctcctctgtgctccttccccttgacaaaacctcccactctcaaactctgtatgttttgtgatcaataaatgcactcgtattattcaataaacttccatcttctctgttcattctctcccacctctttgccttaaaaaaccctcatctttttttctaagacataattcatccttagttctctcagtggaggtttctctgcatctcactgtccacattcttcagggcaggggaggttgacatgttgctcaagcctccatccttcctttgtcctctgccatctggttacaccactctcacactctgcacccggctgttatctactgatgtcgggggagctgctgctcattcatggaagactttggtatcaaaccatggcataggtttcctctccaccatgtctctcatcaattcatcaatagaagttattaatacttcaatacctattaaagggtggatcacccagtcattagcctttcaattttgggatgcattcttttttttttttttttttt

SEQ ID NO: 93649 - DNA, 91808 bp, Homo sapiens
agctctaataccagcattagaatgaattttcataattaagtttattctttccctttaatatatgttaattatagaatatttagagaaacgcaagtgtcaaaggagaaaaaattacccatcgtgtcactgtccagagacattactgagaacaccttggtgcatttccttcctgtctctttcagctgtgcatatattgtgtttgtttgttgtacatacttgcgttcatattgtatctatattttttatcctgcttctaaggcacaagcaatgtgccttacaaacatttgactactacatagtaatccacctggtagattcactatcatttttgggtttatccttctagtgtaagatatcttagttattttatagtcagttctataccttgaatatcatggtatgaattgtctttattgtgtagactctgcagagttttgggaaactgacttataggccaaatgtgtagctattaaaaaagtaggctgagaacggtggctcatgcctgtagttccagcactttgggaggctgaggctggtggatcacttgaggccagaagttcgagaccagcctggccaacatggtgaaatccatctctactaaaaacacaaaaattagccaggtgtggtggcacatgcctgtaatccccgctactcaggaggctgaggcaggagaatcgcttgaaccccagagatggaggttacagtgagccaagattgcgccgctgcactgggcaacagagtgaaactccatctcgaaaaaaaaaagtatataaaaaactgacaagtccttataactttccctgtaaagcccttgcaattgcttcaggtcagaaggcatagctatggtgggtttgtcaaaattctaaactgtaaccatttttaatcagggacctctccccttactcttgaattcatggactttcctggataccccttggtctaaccacctagaggagaaaagcagctgaaaagtgccacttctcatttagtgtgtgggggtggggtgggggcgtgggttgtgttcctctcaactccaaacatgcttcatcgaggaaaagagtaactttcaaatgtttcttctttggtcattcagtatactttaaaaagccatcttgcagtaacccatggctaagtcctgttggctccatcctgctggtgagattgtgagtgtctttagtacctttcagctcagacccaaagcagaacacttccaagacaaacaggctgtctacaacctcaccaggaaactccagagggagttgtctccctgtttgtgcctaagctgaactcagttctgcaggaaactatgagtttgtgtatcttatatgtggccaggtgttgaagttctggctaaaggctcacattaaagaaaacttggatgatagcatctggatgagggaatggtgtcctacgggatcctcttggataatatgtattcaggagacaaaggaccaggtggaagtagctgggatgaatctatctataagcaacttacatatttaaacaactgttgcctgacaaatgtagatcagaatgactgagatcattgtaaaacgtctttcttccacagttaagggtgagtgacaacatttatgatatggcaagcattgaggagtcaacatttcagtggttttctttaagccagagagatttattcattcatgcattaatcccacaaattatgtggctgatgatatggcaatgaatggcatacttccwaccctcaaagaactcagtgtagtaacagacaaatatttagataatttgagtgtggtctagaaagacagaagtgaactggattttacaagaatattgagtaagggtgcccagcccagcttaaggtgggtaggaaatggggaacaatgtcagagaagccttcctggaggaagttaacattggaattgttttttaaagaacagtagttttactggctgaggaggaagaaggacggctgctgggagtgttggggtgggggtggcggggtgcgtgggagtgttgggctgggggtggcggggtgtgtgggagtgctggggtgggggtggcggggtgtgtgggagtgttgggggtggggttggcagggtgtgtgggagtgctggggtgggggtggcggggtgagtggatggtagtgctcaggaaagggacagcatcaaccatggtatggaggggatgtggaatcaagacttgtgcctggcagcactatgtttgaaatgctaaatgggcatctagaaatgtcacataggcatgcagaggtgtgtgtctacagttccagggtgagggcatagctggagatctaaatttagcagtccctggtatatacatggtattacatgatatttacttaagactaaatgaggttgctcgaagaatgtgtagttacacaagggaccccagtacggaggctggggagacagatcaccgtaatatttatttatttatttagagacaagatcttgttctgccacccaggctggagtgcagtggtgtgatgatggctcactgcagcctcgacctcctgggctcaggtaacccaggtagctgggactacagtcacgtgccaccacacctgactaatttttttgtatttttttgtagagacaaggtctccttttgttgccctggctagtctcaaaatcctgggctcaagtgatcctcccaactcagattcccaaagtgttgggattacaggtgtgagctactactcctggccaccactctaatatttagagggtagtctaggagaaggagccagcaaaagaaactacaaggaatggctagacaggtggataggttagggggggtgacaaataaagtgtcaaggggaaaaaaagagtctcaaaaaagagggattgatggatggtttcaaatgctgctgggaaatacagaaaaattaaaacagagaagtgaccactgtagcaacatacagatcattaatgaccttgacagaggctatttaagtgcagtggtaagggcagaggacagagtggaaggtagagccacgtgtggaagcacatgcctatagtcccagctactagggagacagaggcaggaggatcacttgagcccaggagtttgaggctgcagtgagatatgatcatgccactgcactccagcctgggtgacagagctagactctgtctttaaaagaaaaaaaagttttgtttttttttgtttttgagagggagttttgctttttgtcgcccaggctggagtgcaatggcttgatatcggctcaccacaatctccgcctccctggttcaagcgattctcctgcctcagcctcccgagtagctgggattacaggcacgcaccaccacacaaggctatttttcttgtatttttagtagagatggagtttctccatgttggtcaggctggtcttgaactcccaacctcagctgatccacctgccttggcctcccaaagtattgggattacaggcgtgagccaccgtgcctggcaaaaatgtttttttaagtggaagatagatatggaagtgagatggacaagagcaacccttgactctgggctagcgggtgttctggcctctcctcctaatggccattctgatgaaagggaggtggcttatggtcctctgaaagggctgaccagggcccaaaaagagccaggtcgtttacaccagggtgccagggtgcactggcccttgattatcagacccaagtcagcccattccacaggcatgcagtacccccaaggctccaaataatgttcttaaaacagcacctggcacatagtcggtgctatatacatttttgttataattatcccagtttctaggcaagctttattggcttctaagaacaaatcatttatgtaaaccaaatcattttcagggtatgtaaagtctatattctctttttctgtcttcctttctctctctctccttccttctgggttctggttaagatggagagctctccctggagagtctgggattgaaccaccaaagaagggcagagcaagcaaaaaggaaaataaatgaaggcatacccagagaaatacatttatgaaaaacaccagcattgaagaaaatacagcacgcagtgcactgaagttttgtacctgttgtacaggtagccaaaagatgacacatagagggtggatttttagttttgattaattcattggtaacgtgggaaatattcatgcagaaacagaggaatgatcatgcagtggtgcagttgttcctttgaaggaattttgaacgttgcattacagttcaactgtcctggaaatcaaaaatatggtagaaagtggagatggtggggaggacgtgtaaatatctttaactcccccttcttggtttccaaacgcctttatcactccattcagccttaggccaaattctggatgcttttacaggtgtttttcacgtgtaaaatgtgcatatctatctcctaggagtatcgtggagatggaatgggatatgtaaagtgtgctgtatatagcaactgcatcattagagcatctttcaacagaagtgcacatcccctcatagctgatgactggcatttcctgttcatttttttccttctacctcttaaccttactgacgatgctttcaatacaaatctaataataacggcagctaacatttatcatgtgctcaaattaagtcatttcatctccccaacaatcctatcaggtaggactgtcatcttcatctcctgagccttggaatcatattaggcagcctggcttcagagcccagcactttttgtgtttttgtttttgttttgacaggatcgcattctgtctcccaggctggagtgcagtgatgtgatcacatagctcactgcagccttgacctactgggctcaagcagtcctcctactgcagccttctagtagctgggactataggcacgccatcatacctggctaatttaaaaaaaaaaattttttttggagagatgggtctccctatgttctccaggccgaactcggaactcctggcctcaagcgatcctcccacctcggcttcccaaagtgctgggactacaggcgtgagccaccgcgcccggccstgagcccagctcttaagcacgcagtccaacacgtttagctggagagacgccgggtcacttcttgggccataccctctcatcacaaactcaggtttctcttagaaatcactcttagtgtccgcagtgcctaggactcccgccttggatcctggggcccacgagaaggtaatttaattcacccagatagaaccagcccaatcgtgtccctctgaaccccgtgaactttcaccccggctgagcagtaagtctgcaccgctgtccctttctttgtggtctcagggctaatccaaagtgacaatttcctaagaagcagtacggggttttttgtttgtttgttttttgtttttgagacggagtcttgctctgtcacccaggctggagtgcagtggtgcgatctcggctcactgcaacctctgcctcccgggttcaagcaattctcacacctcagcctcccaagtagctaggattacaggcgcacaccaccacgcctggctaatttttgtatatttttaagtagagacggggtttcaccatgttggccaggctggtctcgaactcctgaccttgtgatccgcccgcctcagcctcccaaagtgctgggattacaggcatgagccaccgtgcccggcccaggtattcctagaagacataggaccccatgaatccttgcaggagagcacgtaaactggactcctaagcccgccccagagccccggcgctagtgctcgaggctgggacactgctaggtgcacacagccgcggcctggcgcaggcggtgcggacagagggtatgccatggcgagacgctggcgcggcgcaggccctgccggccgggacacggagggcggggcacaggcgcagcaggaagggggcgtggccaagagccgcccggccgctcccccgcccctccccctccgctctccgccccagcccggcggctccgccccctaggtgacgtcactggccaggccagccggcgccattttgaaagtggagtcgcctgcccctgccgctgccgccgccgccgtcgctgtcgtagtcgccgccgccgctgccggagaaagagcacgagcggggaagccccagagtgaaatctagcatcctgccggctggtctgcccgcccctccttccttttccccccggcccccgtcccctccccccgcaggtgccatccgccgccatccgccctctctacccccccatccccaggtgaggggggtgagttcaggaagcggagaccccgaggaacccagcagggtcaccatttgcagcgcaacatggcaggtaaaggagaaatccccctcgccccctgacaaggcaccgcttccttattcctccctccatcaccccctagcgaccgcccgcgcctcgcgcagagccacagggcgcccctcgggtttgagggagtagggtccagaggggtggggtgggggcggggagggctcccgggaggcaagtggtcacggtgagagtcactgggcttggagaacggggctggcgccgtggcgggggtgggggtggggtgtgccggcgagcttggggtgaggcgtgggtggggcggggtgggggtgcgtgcagatttgtccctcccgctcgggagcctggtggatcttctcccacctccccaccttgccccccgcctttatttttttttcctgcaggtcttcatttaatttctatttttccccctgctgcaagccttcttgggtgtatatacacatttattttgcctcgagaaggaagagcgccttataagttaaaatacagtgggggcatatgtgtattttttccccactgtagatgccaatatttttgagactggaagcctaaattttttgtttcgaaccatttcgtttccgtttcttcccttttaccgccgaagagtgcaaggcctttcatgtacagcaagttgcatgaaaataatttaaactttgcgtttagcatgttagcttttttgcagatgtccttttcccaaaagggtttggtagagttagttaaaatagttgcggagttcagagatataaatagcaaggaggagagagatttaggtagaagctttgaaggggaggggaaaggatgtagagagaaaaccagtttggaaataaatttagcaaggaataggggtgatgggggagagagaagtaatgtaattgctttgagaattctttttgtacatgttggtattgctaaatcttttccttcatgtagtagaatcagttgcagatttagattcagtttctttctccctagagccccaggacattttcaatcatttcgacctcagtacttgcacgtgaaatagaaacattccgagatgagaccagttttccgtgctgtattcattatttagataattaaaccttttgaaaaagttaacatgtcggattgacttacggtttgctataaacaagttgcttgttggccttgttgaaaaatgaaatgagattaaaattgttttgcacgagatgacattagcaaaatgaattctttgccaggtcctttggagtcaagggatgaggtgaagggaggcagaacaagcttcctttgacagtctctttagcagcattcatttcggtttcttttcctctctgtctggagccagtgatttgctggtaatgaatgcaaagaaatgggtgtagtgtttgctgtgtgtgcactttggtgataaggttcatatgaatcattactccttacccaggcagtaatgttcccgaagttttctcttcgttctatgtttcatggtagtttaaccttattaactcttctgcaggctttttgtacacttaagaaaactctttaactcttggtatttactttttttctggtaggtcttgcctgaatgtaaggcttttactgtatttgacaggaagtttgtgaacagatgtttaatgaccacagaacatgtgcctttaaatatttcgtacctggaatcttttttttctttctaatgcagtaccaagtattggggactaacctctttccaaactggtgctcttggtggtagttgtatgtgtgggcagaactaggctgttagtatcatgccaaccatggataccatctttgtgtttacgagagtcaacataagcagaactcggttttaattggtatgttttctttttccaggagctggaggagggaatgatattcagtggtgtttttctcaggtgaaaggagcagtagatgatgatgtagcagaaggtaagaaagcgtttaatgcaaaatttggatatataatttttgcagaaatgtttcctrctggaggatttccttgaagccgagactgctataaattcaagatgattttgttgtccaagaaatgtaagaacagttttaaaagatacctttctgaaaaacagccttaaatttcatttgttatttacgccttgtttttattattttttcctctgaatttacatggaaggagcggtagatgatgagacatataagatcctcacatgaaagctctgagctccatataagggtttctttgttatgtaaattccacatacaaataaatggtgatgcatttttatgtttgtacattgkttttagataagtaaattgaaataggtgccatcaacatttggctcagaaacattcttaacggcatctttgatttttatgggaagattttttaactacttttgaatttgtccactttgggagtgtgatgctgcttggcatattctgtgaagagatgatagctcagattattcattttgttgtctttctggtatttaggtkgataagacagtaacaatgctatgcatatatcgcttgtcttttaggaatcgtatattcttgtgcaggtagaaactgtgtttgatcagttgaagtacttacgtctaattttctccccaaatttattttctaacgtgtttcagaagtttaagttttgaaacttcaaggttttgcattcatttgagatggtcttaggcagcggaggcattttccacaaagttgttgcattgtttcattcctgagaaatgttraagtttgagttttaatggtattgtgtgtcttgaattacagtaggaattttccaaacaaaactcagataaatttaaacatgtacttgtgagttttaaaaatttggtgaaaattcataaaccttttttccctagattgtgttgtcctcatatttctgacctgtctgtagggtactgtttgttctggagattttttttcaggtggtgggtggtagccgaactctcttatttgcttgtgtcagtgtcatccttaattgtctgttttagagtgtggtgaatcctatggcaagccaactggtgtagattatacttgtcatattttgcagagctctctcacgttccttttctattggatcctcatctgtttcttagatgagaaaccagaaacaaaagagactgactgatggtcatgcacatagtgtaaatcaaggttttctgatgaagtcagtggtgtttgacttgttcagagaagtaagtcctgacttcaagggaggagttgtgtattactcatgttgtaackacattacctgttgaatagtaaacactccagtattggatcattagttctgtgcagttgtgtaatactcaccaagttatgaaagtgctgtatacttggaaaatgttctttggttgaattccatttattcccttaggaaagttcccctaaatgctgagcactgagggtacttggtgtctggaacataaactctgcccacaaggagctcatagtttgcttgttaaacattacgcagaaagatcacatggcttttatttaatcagaagaaattgatagttcaaagtgaacatcatttacctacctgaaccaaataacttgtgatatacattaagtcctcccttaatgtataggttctgtcaataatgtaatgtcaataggttctgtgactttaagcaaagaaagcaacttataacaaaaccattttttatccataccataacaaaagatgctgagcagaaaacaaagtcaaagttttcaagaacctattgacgtgaagttaggagataaatcagttatagttcccctttgctgatacttagtagctgcatttttctactgrttggttaaataattttctttagaggttgttaaatattttaacgtaagcatattcttagcatcgtaaaatgctgatacttggtatatacattttagtaarataacatatcttagtaaaaatatgactagttctaataggtattgctgtacaaatgtattaagtataaaaataatccagttttcaaatgacactgctttaatttggatatttctgcatactagagtttgcatattatagtcttgcttatttgactaaggggagatttgcttttctgaagtaaaataaggttattaacacattccccacccccctacctttagactgatctcttmaacaggttacatgtagctcaacttttacttgcctgttttctgttaatgatacattttgattgtctccatattgcctgcctttctcccgtctacatgcagtcagctgccagggcataccatttttactctgtaatgccttaatcttctttgcatacctgctttcacctctattcaggtttgcactctccctcatccagattgcagtaagttcctaaattattccctgcttcttcgtcctgttttgcttcaaagttaatcttaaatgcagtcccagttttgtcattttcctcataagtctacaagtggatcactgtatccactggattaggaattaagttcaaacatctcagtctagaatgtatgacctttgcccaatatggcctctgctctcagtttatttgctgctatggctaatgacccagctaaacagatactgttcttaaaaggcgttctatgctctctcactttagggtctttgtttttgctgcttccaccttggaatgcctgacaatcatcccacagttctcttaccaggatcctgctcatctctcaagtcacgcctttaacctttttgctaatttcctcttttggaaataacctatttttaaagtcttcctttatagcactttgttacgtagatatcatatggtaccccacatctctactgttacatactacagagtttagtgtaggactgatttatcttcgtwccttatgcaggcatgaagctgctctgtctagaacagtgcctggcacacagtagttgaatatttgtttgaatgaaggaacgtaaatgttattgttcttaggttttgaaaggggaagagaaatgrtaaaaggcaggatgattgagatgtagttctagcagtcatggatttatttacttggtaggctttttaaaataaaaatttaaaacgctttctgcagaatcatcggtaggctttttataaccagattgatgttatacaaccgtataatgcaaagaaatcaggagaccttgggtttttaccctagctccagcacaaactagtgtatgtcactggggataagtactctcctgggttcctgtgtgtttagcaatggaataacaagagtggattaggtgatttctgctcttccttgtactttaatcttgttaatttccaaaggcatgtaaaaacagcccaaattcttttggtgtgtgtgtgtgtgtgagacagagtctcactctgttaggctggagtgcagtggcacgatctcgactcactgcatcctcagcctcccgggttcaagtgattctcctgcctcagcctcttgagaagctgggactacaggtgcaccccgccatgtccggctcatttttgtatttttattagagatggttttgccatgttggccaggcttgttttgaactcctgacctcaagtgatccacctgcctcggcctcccaaagtgctgagattacaggtgtgagccaccggccacaaaattattactactggtaattaatactactggtaagctagattgtttgagataccgtactctctagaggccttaaataaaaaataaattattgctagtaatatattttacatttttaatttttcttttattgaaaactgtctgtcatgagacagtaggttaagagcacagactcaggtgctaggctacatggtttgaatcttgctcagtcatttatcatttctgtggtcatctctttgtgcctagctcccctctataaaatgaggataacaataaaacctgtcttacagtgttgttttgatgattaaatgagtttatacacataaaacagaacagtacccagcagaaaagagccttatgaggatttagatattattacttgaaccttcatattattgttactttgaaggaagagtctttggagtatgagtatattgaggatttgtctttaaagcctactaaaaatttctcaaagtgaaggaaatagcatatatgtgtkttatacatactctttgattccactagtaaattacaaaatacattcaaaattaagctataggtttagaggcacatatgcagctggtaaaactatgaagaaaagctatgaagtaaaaggaaaaaaacatactgtaaaaagtactataaaagtcagtatagtggctacccttaagctgttggaaaggagttgtgatcgggaagggctggggaggcccttgtgggctatcttgactgggatggtggttgtacagatgtttgtaaagagtaacctggacatttttgtttcaatttttggttttctttatctgttacattttacagtaagaagtttttggaaatctaataatgtattaaagggtttaggatgaaaaatggcagtcccctacctccccactccttaatccctagtccatctcctaagagcagttgttcaactcttccgctgggttccttggtgcttcatttcctttttgggaataaaatggtatttctatatcttgtcaattttagtatttccagctgacttgctcctctagtagatgataactaagctattcacattatcacccccatttctgtccccattgtgccccgatgttacatcacacactatgattaaattggacgtcagtgcttaaattgttatgaccacgcacacattctctgctgaaccagtagtgctctgcagtgtttatttcatcctcaaggtaatacagtaattgcttgtttgttaatttgactatttggttttttaaaaaacgtaatcaatctggaacattacagaaagtatgtggaatagtataatgaacccctgtcacccggcgttgtcaatggccagtgttgccccatgtatggttccatcactggaccctttcccatccttttgttatttaataatgtaatacttgtttttaaaatctgaatttaacaaaatagaaagccaagttcatttcttaaagtcgaacagtaagaaattttttctaatgattttgataatgtgtttaaattttacttgtggaaataaattattaaaaattcaaatacatgtggataatctgaagtgtgtaataattggtcaaaataatagaacaggccaggtgcagtggctcacgcctgtaatcccagcactttgggaggccaggcgagaggatctcttgaatccaggagtcygagaccagcctggacaacatagtgagaccttttctctacaaaaattaaaaatattagcagggcatggcagtgtgcaactgtagtcccagctactaaggaggctgagacttgagcctgagaggtctgctacagttaggctgtgattgtgccactggtctccagcctggacaatagagtaagactctgtttcaaaaaaaaaaaggaacaacttaaccattcaagatagttattttaattattttaatgtagatttttcattgtttagtaatcttaaaatatcagatgttattaaatatttaataatgaacctcatctgcatatttgatagtcttaaactttcacaggaaattattttaggatattatcttataaagtcttattttatgaaacttggatccaagtacattgtgtgttttcaactctttgctttctgtttacttttggtaggatttagccttgtggactgggtcttgaaaaaatattttttaaatggtagaggctaaaatatgccccaaataaggacataagtaaaaatttgaaaaacagtccatattatgatatctcacacaatttaatggttttagtccattccatatgtttaatgctataatgtaaacaatttaaaatcatttctcttctgcatctcttttttttttttttgttagagacaaggtcttgctgtgttgcccaggccgtcttctgtgtttcttagagtagtatgcatgttagatttaggcagtaaggtaagttagtagaaaaagtagaaccctgttgttttgtggatttaaaaatagtggcacattagctgtattccgaaacctaatgacctatggtaaaggtcttatttaatatccttaccttgtatgacatgtgacacttctttttcttaacactagcattactactgaagtstagtagacctcactcagtacagtcacttaaagtagtagtgtaagtttacccattaaataccatgaatgatagtatctgtttagcatcaaatagttttcttgctttgttttaaaatactaagttttttcwcattcatttgacaaaaaattatgagagagaatggccattgaaaacatattgctgacattttgtcatgttattaaaataaaacaaaaattagccttaggtgtttcttagtactctgtaatagtgaacaaaatattaaaatcaagttcttgaaaattgtggaataagcagaatgatgagaggttgaagcaaaaatgtattaaatcagtgaagaggttacartatgttacgtatttgcatataagtgtttgcctagtttatcttaaagttgattgtaggaagaaaggtacgtttcttaatgctgttaaataggaaaactgaaggattggaaatagctaaaaaattttagttaatatcctcaactgtaatctcgttgccctttaaggtgatgatggaatttgtaattaagtaatcaagtatccataaggtgcttcctcagcagacagaaagaaaagtaaaagctggcggggcgcggtggctcacgcctgtaatcccagcactttgggagacggaggcaggcagatcacgaggtcaggagtttgagaccagcctggccaatatggtgaaacactgtctctactaaaaatacaaaaattagccgggtgtggtggtgcgcgcctgttgtcccagctactcaggctgaggcagaagaattgcttgaacctgggaggtggaggttgcagtgagccgagatcgtgccactgcactccagcctgggcaacagagcaagactccatctcaaaaaagaaaagaaaagaaaaagcctaggtgcaaattagattttctataaataaactgctatatagtcattgtaaggaaggcatggcatggccatcttgagtacctacattttttgagtgcttaactatgtatcaggcattgttttaggtcctttacatctatttatttactgttcttcacaaataccctgtgaaataagtagatactggtgggaaagttaattaactgtataatcttgagcaggtggtgaagctgggattcttaccttagacctttcacttttcctaatataattttatttcaaaacttaatctccttttagttcaggtgaaggcgtttgatgttgaactgcaactcctgtttataacaaggtttatttgtaatgcctagtagatactttttattttgaagtaattaaatataatttggagatttgttgaattttcagctaatgccattcttttttttttcctttttcttttttttgttttttttttttgagacggggtcttgctctgtcatcctggctggagtgcaatggcgtgatcatggctcactgcagcctcaacctcccaggctcaagcgatcctcctgccccagcctcctgagtagctgggactacaggcacaggccaccacgcccggctagtttttaaaaatttttttttgtagagacagatctcaccatgttgcccaggctggtctgctgatggcgttcgttagctgagatgtgctatatatagatgggttataagggctttgtgaaccctctgatgatgtgtgtgaaattgtgtgtgattgtacatatgtgcatttctctggtcggagtccgtagctgccatcaaaattgatatcatttagtccagtggttctcyaaatgtcgtctggcaacccctgaactcattccaaatgtctgtgaagtaaaaactattttcacagtagtactcaggtgatacttgcctttttcaatacattgactttgcagcagtgctgcagaagccatcttagcatgagatcaagacagtagcacaaaagagtacctgtagaggtaatcttcattaccatgtactagcagtttaaaaaaccatcagttttaagaatgtccttgaagcagtgaaaacttaatttgattaaatttctacytgaacacatgtctattaaacgttctgcatgacagaatggaaggtatacctagagaaagaacttctgcaagggggtaaagtggttgtctggaggaacagcattggtgcagctgttttgagtttcaactgcagttttcatggaacatcacttttatttgaagtaactgatgaactatagttattcagacttggatatttggtggacattttctcaaaagaacagtgaaactgatacttcagtgtacagtgtttgttgcccatgatgaaatttgagctttcaagcaaaaattagaattttggaaaacacgtctctgccattgtgagcttgacagcctcccaatacttaaaatattttttcaaataaaatcagtagtcatattaacgaatgtgattttttgatactatgtaatgtgttaacatttggaagatctgtataactcagtaaatcagtcttttacgggtgaccgatgcatgtgatgttaaacagtcatacatcagtaaaagtgcrtgctagagcattgaattttaatgtgacagactaccgatatgttttgagattccacaaaccttcaagaatccaccactgtggaattttggtgtagtatcaaaggtatatccataactacctgaaacacctattaaaatattcctccctttctaactacatatctgagtgaggctggattttcttcatatatttaactgacagaatatattgtggtgcagtacattgaatacagaagcaattaagagaatcttcattctgttaggccagattaaattaaagagatttgcagcagtgtaaagcaatgtcattaattttgttggtggggagggggatgtagtcatttttcataacatttttgttaatgtgtgaggtttattactattttmcaatgaagaaatattttaaagtttaaaaggtctttgatggtctaagattttaagagttaaggggatcctgtcattcagaaaatttgagttgttggtttagtctgttcatagatttcattttagtaataatgctttacaagtctcatgaaccacaaggtaagtgatcagaatagtgtactgcttttgtggatgaatgtcttaaaaaattgcctacgaaagtagtttctgtgacttgaaattgtttcagtctcctccctccctgttcttttagataccaaattagatctgccttaagctccttcagctggtgatcttggtgaaggaagaataccttcaggacgttaaagtatctatttttaaacttacctctcccttacagagattaaataccagtaacatatttgccagaataaaataattttttacggttttccccacaatgtctgctcaggtccaactatcaggaacactgaaattctcacagcctaatttagtgccactcctaggttgcctgcctcgtcattagaagtgagttggtgaccttgacattgtgttttattttgagcccaacttgtagcagtttggtgatgtgttgtctgttctaggaaagaaggcataaaattggcttgctaactttcccaacttaactactgaagggaagagagagagggaacaatgtttttctgaaaatcctgaagtgaacaacataattatattttaaatagttaaatttcccattctaaggatgtagtatcaactattgcttaatattttcagtatttttgtggctgttttctactcttgaatgccaaagtttgtagacttcagcagttttctgtccaggtttaaacactgaatgtaatttaaaaaaaaactccgctaatttttaaaaatgaatatgaatgtttttagttaattttggcagtagttgattacaatatcatctagatctttgctcttggcatatgtggaatccttggcaagtcgttgaatacttctatataccacattgccgggagttacgctcttgtagcttttagtttctattggttaaatcctctctgtatgttcaaataccagatggagttttctcttctagaatcttcgaatgatctctctttttccagttcacagggtctgtggaccggtgatctggtttaagaacttctgctctaatcttgagttatgcctgtgtttacacacttactgaaacttctgtgctggattctaaatttggaagaatcaaggatatttgtgtggtaataatggtgtttagactatttaggagggtattttttcttaccggtcctcttattactttttcctgagataatatgggagggattaatcatctgtaaaataccagacttgacagatttagtgtgttcccatcttttttttttttcctttattaaaaactgtctctcatgggtaaaaacattagaaggatatattggattttgaaccagttgcttattttatactttaatcagaaggaaatttaagtttttcagtagcttgtattaagagagaaatcagagtaggtaaaagggattgggggcaaaattttaaaaattttctaaagatccagaagaacatggttagatctggagcagtgttacttttcaaacctgccattgcaggctcattgtaggtctgtctgctctgtatgaaagtagaaatagtacctttttggtgttaccctgcgtgtctgttttttcctgcttaccacaaggtaagattcttaagggtggatgactttctaagggaacaaaagaggaatctttccttttggctaatagagtgggaaggctctaattcaagagaaacaggctattgtaggcaataaatagttctgaccaaatttcttatcaaggcatgcaacatgcaaaaatgtttgttaaaggaattggtagtagcaaaggcattgcttgttctgtctttcttctccttgacataaartgagcattatttttttttctagcaacagaaccaatttttaatgaaaatttttagctacctaatgtttttatgcatattatagaaaacatataacattaaatttrccatcttaaccattttcaaatacactgttcagtagtgttaactctattcatattgtgaaacagatcctcagaactttttcgtcttgcaaaactgaaactctatacccgttaaataactcccttcttcccctcccctcagctcttggcagctaccattctactttctgtttctgtaaatttgactgctttagattcctcctccaagtggaatcatacagtctttttgtgactggcttatttcataatgtcttcagggttcatccctgttgtagtatgtgacaggatttccttcctttttaaggctgaataatagaccattgtgtgtatatatcccttttgtttattcattcattctttgatgggcattttggttgctttcatgttttaactctcgagctcctagtctttttatatatatggggttcggtgggaaggaaccaggtaggtactttctgtaattaatttgagtagtctaggtagaacatgaaagtgtcagtttaaaggatttagagattggtgtagttttatttttaaaactcctgtttgattgagtctacatctctgatttttatggggagggggcagagctaaggtgagacacagccacaagtcaacaggtatctgttgagttcccagcactgtggagaatgtgaaggagatagaagacattattccttcattttaggtacatggaggtccattttattgaaataaacatttcccatagcacttggcatttggtattacaccctacgtatggtactgtgaaaaccttctctaatgccatgtaaaaattttacagatgatactagagtctgagtagtaaattactttcccttttctaagttgattttatgctgcttgatattgagatggggatgtagtacaaatatttacttgtttcttggagttaaattttaaaaaatcccatattgcaggtctaagaccataaatttgtcttttactgctttcaaatggtcgtgagttggaattttccaattagtatttttagagacttctctaggtgaatgtttatggtagcctacaagctaccatacaaaattacaaaaattagctgggcatggtggcacgtgcctgtaatcccagccactcaggaggctgagacaggagaatcgcttgaacccaggagttagaggttgcagtgagccgagatcgtgtcactgccttccagcctgggtgacagagcaagactccatctcaaaaaaaaaaatgagtttctagactggacgtggtgactcacatctgtaatcccagcactttgggaggccaaggtgggtggattgcttgaggtcaggtgttcgagaccagcctggccaacatggtgaaacaccgtctctactaaaagtacaaaaattagctgggcttggtggcgcttgcctgtaatcccagctgctcagaaggctgaggcacgagaaatacttgaacccaggaggcaaatgttgcagtgagcaaagatcgcgccactgtactgcagcctgggtgacagagcgagactctgtctgaaaaaaaaaaaaaaaaaaagttttctagagccaataaactgcatttacaaaagaaaaacattttacagcactgtacttctgagtcatacacagactacatttacatctaacttttcccactgtattaatcaaatctagtttgtacgtctgttttacaaaccaaatataggtaaagatttttatgttttagtaactaggttaaaaaaatctaataaaggttgggctttattagatgatgcatgcctgtagtcccagctactcaagaggccaaggcaggaggattgcttgagcccaggagttcgaggttgcagtaagccatgatcgtgccactacacaccagcttgggtgacagaaaaaattaatacatatatagaatggtaaatcaagaggaatacagcaaatgtatgcttctctcttctttctcccagtttcttcgtcctctcaccagagatgccatcacaggtttcttatatatcattccagaagtattttattttgtatttgcaatgtttttaacagcgcatctttatcattttggacttgaaagtaggaaaatgtattctaggaatccatgaattattaagcaaggtctataggccctgccttaaagaggatctgatgagttgcctgagaaattagcattttcttttaaccagtagattaaaaccatacagatttctatatggagagttgctgagaaggttgtacacatttggaatttacatctagatrtgtaattagtggactctaaacaaagctaagtaaaatctataatatctaagatatacaagtctttaaaaataacagtttgggttcacagatactggagtcttcggattgtagaccttaagtcttctttctccacttgaatctgattgttcctggcagtgtgtaaagtgatcggttcattttggtgatttatttaattaagactgtactacacattatagaataggctagatcctaaagacataatgtgtgttcttaagtgttcagtaaacacgtaggcctttttggtcacttgtccaccatgtctaattctcgacctaatttcttgggagttttgttaatattccttaaaatgccaaaatgtcataatttgtatactgctcaggttgattggaataaagctttgttaaattcttgctatgcagaattcttttaatctttaagaatttttgtttgttaaaggaaaaacaactttgattataaatgtctgagaaatttaaaaaataagtgctcaagagactgagctgtctataagtgctttatatgcattatctcgtttaatcctctcactctgaggataaattattactttcattttatagatgaggaaatcaaggcttagataaagtaacttgctcaaagtcacgtagttggaaaatgggggagtgaggggttgaaccttgttggttcttctgacttcacagcccatgtactatatgtaaatgaaaaaataaaatcaaatataggcatacgtcagaaatattgctgctttggttccagatcactgtaataaagcaaatattgcaataaggtgagtcacaaatttttggtttcccagagcatataaaagttatgtttacattatgcagtagtctgttaagtgtataatagcgttaatgtctgaaacaacagtgtacatgacaattaaaaagtacattattgctaaaaaatgttaatagtctgagccttcggcaagtttacattttttgccagtagaggatcttatcttgatgttgatggctgttgactgatcagtgtggtgtttgccgaaggttggagtgactgtggcacttcttaaaaagtgccaaatgaaatttgctgcatcagttgactctttcatgaaagatttctctgtagcatgcaatgctctttaatagcattttatccacagtagaacttctttcaaaattggagacaattctttaaccctactgctgctttatcaactaagtttatataatattctaaattttgtttgtttcatttcaacaatgttcacagtgtcatcaccagcagtagattccatctcaagaaaccattttctttaaaaagaaactgctcatctattgatggtatcatgaaattggaccaatacatctttaggctccacttctaattctagttctctcgctatttccactacttctgcagttacttcctacatggaagtcttgagcccctcggagttatccgtgagtactggaatcagctcctttcagactcttgtcaatgttgatattttgacatcctcccatgaatcatggatgttcttaatggcatctagaatgttgaattctttccaggaggttttcagttgactttgcccagatctttaagcggaatcactgtctatgtcagttacagccttacaaaatatatatatatatatactttttttgagatagggtctctgttgcccaggctgcagtgcagtggtgtgatcatggctcactgcagccttgacttcctgggctcaggtgattctcctgcctcagccttccaagtggttggggcttcaggtgtgcgccactacacctggctcatatttctactttttgtagagttggggtttcaatgtgttgtccaggctgggcttgagctcatgggctcaaatgatccactcaccttggcctcccaaagtgctgggattacaggagtgagccaccatgcgcagcctatatttctttaataatgctaacaattgtcttgtaagtcagaatcacgccttgatccatgggctacagaatgaatattgtgttagcaggcatgtaaacaacatctccttgtccctctctatcagagttcttggatgagcagcaatatttggaaatgagtcttttttctaagcagtaggtctcaacagtgggcttaaaatgtttagtaaacagtgctataaacagatgtgctctcagctaggcttttttctagagtacaggcagagtagatttgggccctagaattcagaatggtcaatgagcattggcctcaacttaaagtcacccagctgcattagcccctaacaaaagagcctgttctttgaagctttgaagccaggcatcagcttctcctttccagctatgagagtcctaggtggtatcttctttgaatacagggctgttaatacagagctgtttagttgactttgaaaatctgttgtttagtgtagtcacctttatcaattaaattatcttcctttcacttgaacacttaagaggcccatagggtaattgtcctaatttcagtattgtgtctccaggaggcccaaggagggagagagagaggggaactgccagtaggtggagcagtcagaacacgcagcatttttaagaattacatttgctgtcttatggaggtgcttcatggcattccaaaacaattacaatagtaatatcaaagatcattggtcacagatgaccataacaggtataatgatggaaaaattgaagttttgcaagaattaccaaagtgtgacacagagacacaaagctagcacatgttggaaaaatggtgccattcggccaggcgtggtggctcacccctgtaatcctagcactttgggaggctgaggcgggcggatcacgaggtcaagatatctagaccatcttggccaacatgatgaaatcccgcctctactaaaaatacaaaaattagctgggtgtggtggcgtacgcctgtagtcccagctactcgggaggctgaggcaggagaatcatttgaacccgggaggcggaggttgcagtgagccgagatcacaccactgcactacagcctgggcgactgagcaagactccctctcaaaaaaaaaaaaaaaaaaacacagtgtctatgaagcacaataaaagtatgcctgtataatctcgcaatttttatattatatctgttaatatttgggcatagatctttccagcatatagttctttttccacagcaaatatgtattttcaaaactgttatcagacgtacagttttgtattatgtttttttccagttaacatatatgagaagataaatggctgtatgatatttaattggatctctaatgtatttcatttagacatttagattgtttataatgtttgctattgtaaagatcatgatgaacatccttgtgagaatcttattgctttaggatatattatctggaaatgggattgctgggtcgaaaggtgtgattttttttttcctttttttttttttaatggcttatggtatttattgccaaatcaccatagaaagttggtgttgatttttcacttcctccaatagtgaatgggagtggccatttcctgacctcttgacaatacctggcacaatattcaccattcagaaaaatcttttccagttatttgtttgagcacgttcaaatgttggagcctttttgtgttctttgtctagttttctttggtgatgcttttttaaatttatttgtagtatcacagcccttttccccttctgaatcatacattgtagtggaggaatgttggagggaagctcaaagaaataatttgggtctgtattacatgggaaagacttcctaaatgaagtggatttttttcctttttcttttttcttttttgttcaagcaaaggaaaccagagagtaaggaaacaaacatttgagaattgctgtgttttagttttcttatctgtaaatgggaataatagtacttgtctttttatttagaggattaaatatacatgaatgcttagttttggcacatagtaagcctcagaacatttaattgatgtagttatttttctatctgatacccaattaacagaattaacagttgatagcagaagaataaaagcctattccggtccacaaattgagatcaactagtttttgaggttttgggcacattttaggcacttccaataaatatacgttacattaatgactaacatttcagcttggttgagttaggcatttggtaaaactagggagagattagtttcccagcttcatcagaattgggattagtttagggtctggcactttgactattaatttgactaatttaaaattattgtgctgagccgggcacggtggtgcaagcatgtaatcccagttaattgggaggctgaggtgagaggagcacttgaagccacgagttcaaagctgttgtgcacagtgatcatgcctgtgaacaaccactgcactccagtctgggcaacgtagcatgaccctgtctctgaaacaatgaacgaaaaataatgtgtgacaacagaaattcaagcttctttttttctctcttgttttcccttttttctccagttcctccagtgttttattcttccctrtaattatatattctgcatcttccctcaagagtaatataattgggtggggtggggtgcacctagaacatgcaggagggtccaaagcacccttcactattggtgtcagtttctcatagcagggagggatggagtttgggaacatctgaagggatggtgtcaggcacacggaggctctaaaacaccctgctattggctccccttgctacctagggcaacgttgtaaatagcatattttttacattataaatattttctctttctcctcgttcttctactcacttgtttgtatgatgatctgaatcttttatcagagtttcaagtaggctgacaaatatatttagagcccttggaaaattctccagaagtctgaagagaatagaaatggaaagcaaatgttattataccagtgaacatgcttaattcccctcaattccttattcagaagtgtgctgttttgttaaaagagttgtattggcctgataatcaacacttctctagctttatgtgcatgtgaatgtcctgggaatctggttaaaatacagatgatgatggtgcatttaggtcttgtgggggatcctgtgatttttgcatttctgatcagctcccagtgatgctggtgttgctgctggtggtccccagactatactttgagtggcaaggcagcttatagcctctctttaagggtaagggagacctagtagcttaatttttttactcagcatttttgacagaataaatagatctattgtgctgttctcacatcagttaacatttcttctgtaaatgaataaaatacctctttgggagttttgcactagctcttaaaagagcagattgcatcatactgcaacacgttagccatctctagttgttactttaaatttgtatttcaatttcaagtttggctcggtctaagaccttactatacttagcaaaggtgtgttttttgctggtaatttgcccttaaatttttatctttgccatttttctgtttgcttccttacccttgaggcacctgttcatctcagatcagggcctcccttaccagctatctaagtttaatgttgttttagattgatttttattttatccatgtagctcatgtatatagtttttaaataaaagtccatatttcaaaatacttacaaggcaaatgaacagttttctgtttctctcacctgtcctcatcttgatccactttcccaaactcttttagctatttcttctggtgtttattttcatatttcttttttttctttttttttttttgagatgaaatcttgttctgtcgcccaggctggagtggcaccatcttggctcactgcagcctccacctcttggattcaagtgattctcctgcctcagcctcccaagtagctaggactacagatgcgcgccaccatgcctggctaattttttgtatttttagtagagacatggtttcactatgttggccaggctgatctcaaacccctgacctcaggtggtttgcctgccttggcctcccaaagtgctgggattacagggatgagccaccgtgcctggcctattttcatatttctaaactacatgctcatacagctgtttttaaaagcaatccacagatggaaatggtagctaagaactgaggtccgctaggctcttcctactgctcctcccagctttcttggtrttgttacactgtgttgattgtttaagccagtgttcacagttgtagtagactggataatggtccccgaaagaaatctgcgtcctaatctctggaacctgtgactgttaccttatatggcaaaaggacttgcagatgtgagtaaatcaaggatttttgagatagggagatcatcctaggttatcctggtaggctgtaaatatgtaagcacaaggatgctataaaagggaggcaagaaaatcaaaggaggaagcaagagataggagtgattgcaaggaaagggtcacaagccaagaaatgcaggtggcctccagaagcgaggaaaggcaagaaaatggattctccccttaaagcttctagaaggaaccagcccagctgacaacttcaccttagcccagtgaaactgttttttgactttaactgtaagagaaaaaaattaatggtgttttaagccaccgaatttgcagtaatttgttacagcagccataggaaactcacgcaggagtggacattgtacatacgggctgtataataaattctgatttttttctattattgttttctttagagttaaaaattaccttattcatttggcttttaatctcccatcactgttttctttctgcaccttcaaaagccttctaatgtaattttccacatgatcaagaagaatcagtttatgttcttcctggagttctccatcatgtttcagtctggagtacttcgtttcgttttctgtgaatctgtcactaaatcatcttcaaatcctctgcagagactgaatcccctcctagtatattgaagcacatcagatgttgtatcagttttacttttgccttaagctctatccctccaacccgcgtgcttcaatctgggcagtttctaagcctggtgcacagctgttgtcctgggattttccttcatcattatcattgtgatcatcatcatcgtgggaattcttttgcctctgctgtgttggagctccttgttcttggatctcacatctttttctttcttgttttatgctattattttgggatggtgcacagtatccagtgctttatgggaaaggtttcataggaggtaaaatttttgagatcttgcctgcctggaagagatgtctttattctacttccacactttcaagtttggctggttaacattttccgttagaatttgggaggtgtttcttttgtctgttagcttcyggtgttacatttgagaacactaatgccattctgtttactgatttttcctttctggatgatgtgctttggtgtgggtctttttcattaattggactcgtactcattggacccttgcagcttgtagattcatttccttctgttttttccttctctgtttcatttgttctttctggaacttatctggatcttggactttttgtactggtcctctttttttttcccttcccccccccccccccaactattttccatttcctttttgctttacattctgggggagttcctcagttttgttctcaactctttcatttatttttaccattgcatttttaagagctcttttgctctttggaaataatgttggtggtggtagttttaagcagccccggttttataaatggagtatcttgtctttgagaagattaatagttttttgggtttcttttcattttctaatctgagcatctatttcctttgagtttcttttttcttattcatattggtagactggtatctggkaatccttggttgtctgttagttcttaagaatgaggtagtaagagtaaattaggagctttgtgtccactggcagagatattcggctggtgggcttcactgtagggtgatgagccagggacccgcagtcagtatctctagatgagaaggaacttctagtgtcttatctcagtgggaggtgggtaagtgggatgggtcacatcttaagcctggctgctgacattctgggagccaggaagatcaccgagcaactcatggattactatgcagcctttcatttaatcttgtttttaatttgacgcctcaccaccagcttcctctcaaattgataccttctcaaggtcaggttcagtttctccagaaggtaaatgtgttctctattttagagtctagcttctctgtgtcttgcatagatgtttcaaccaatagctgttttgagtctcatgcttcactgcagccctgcaaggtacctggtgcttctgtgtcctgacttgacaaccccttttgcatgctcagaggtttcactttattttgctgagttttctatttttcagcacattggttgttaccttccttctgctgttgccttgcgttttctttgttcttattttagactgtttttattagtttaccgtcattttagtgggtttagaagataaatgcgtgttttacatctacatgtttaacaagtgtatcaaaatgtttatagtttcttttcattcatgtctagaacacttggtaatcactttctatgcaatagaaaaggggaattcacagaatttatataaaagtagatttgttttcttaaatctaaattctgatattgtgtacttctttttttgaggtggagtctcactgttgttgcccaggctggagtacaacggtgcgacctcggctcactgcagcctccgcctcctgggttaaagcagttctcctgcctcagcctcccgagtagctgggactacagacacctgccaccacgcccggctaatttcttttgtatttctagtagagatggggtttcaccatgttggccaaggtgttctcgaacttgtgagctcaggtgatccacctgcctcagcctcccaaagcgctggaattataggcctgaaccaccrtgcccagcttgtgtactgtttttaatggccttttctttcttcaattaatagcaaaaaaatgatacaaattaaaatagcttttgtctaagatactaacctgcatttttagacctaaatttcaggcatgaagcagtcagccaaaagccgtgaggttttaaagaacttaatatatcagagaaaacttcagctttcttagataaaaatcagtttatatttttttactcctgaaataatttaaattaacacatatatttgtcttagaatgaagacatttgtcaaagaccttttgggctgctgttaacagaatagtacagactgggtggcttacaaacaaacaacagacatttatttctcacagttctgaaggctgggaagtcctagatcaaggcaactgcagatctggtgaggacctactttctggttcagagacaactgtgtcttgacatgatagaagggacaagggctttctcttaggtctcttttatagggacacactaatcgcattcatgagggctccacccttattaccggatcacctgccaaagacctcccttccaaatacatcatattaggtttcaacatgtgaattttgtgggggatgaacatttagtccatagcaacataaagtagaacataagattatagtcagttactgattgcagggcaactaaaataccagttttccattgggaagatgatttgtcttgaaactaagacaaaggattaagagagtaatggctttctttgttttccatcaggaatactcgcctgttactagtagtacaacatttgtatcgtaggtttagtactgtgctccctctgcctaccccagaggtcattcctgtcattctccccttgctcactagtaggtccagccacaggagctttcttgagggctttgaacttgccccttttattctgaaatagaccttccttcataatcttgactaccctgtgtaaattaactcatttccattccaaccccaaaagagatgtacatttaatgttatctgtttttaaaatatctttactattatttgaaatgatgttacttattgtttgcttgcttattgtatgtaggcttctttctctccagtttgtgagtttcacgtatgaggaaatcctgatttttttgttctgtgattttcattcttagcatctgtaacatttttaggcacaggacagtatctggcatttagtgggcatttgttgaatggatagataaattctgcaatatgtcatctcattttaaaatatatgataacttcagttgtttattttactaaatgtacactttgttgtttaaaatagggaaatgaaataagctaaaaattagtagcacttcccagttttttgaaccagtaaaaggagacccagacaaatccccacagtcacacaagctagtatatgtattattgaccaaactactttaaagacccacatacacagtggttcaaaaaattagcttgtttctctctcacgtgaccattggtggcagagagggatctgaagtggataagctggttttgccagagattacccaggattgcaggtttgttctgctcagggtctaggtgtattgctcttgtgtgcacggtcagatctggctcaaatctgtgttctatctagcccatgggggagaaaagagagagaagggcaagtagctaccttttaatgatgtgacagaaattttattcataacctattgtttagaacttggtattagagaaacatgcagcctctaatttcctgttaaaactctgtgtgtatgtggttttttgggttctgagagtgaaggtgccaggatgtgccattactaaaggagaaagggggaaatggccactcttagggacgattagtctctgctacagctactaattcttagaacttttactcaggactttgttcattcctctttccttcctccttccagtgttactgtaaaagccttataggatcctaattcaaatagtttaatattttttatgacatgaaacaattggaaatttgaacagttactggatatttcatactaaggaagtgcttttgattttttcaaggtacggtaatggtgtttgattatattgaaaatggtggtcttttataaatctttcctgaaatatttatgggtgaaataatttgatgtctgggatgtacatgaaataatgtggcatgggtttatagatgaaacaagattgtctatgaatgtataattgtggaagctctgtgataggtacacaggaattcatatgatgctcttctgcctacttttgtatatgattgaaatactctgtagtgaaacttttaaaataccagtttatactgatacctccaatttaaattgataccgcagggttattccttacttccctcattctatatttatgtcttttggctctcacagtgagaaccttagttcccagccctgtaactattttttgtcagaatataaagatagacagaacctggatatttgataacattaagccaatgaattaactagccctgggtttacttgccatgccttgggactttttatgtgggatgacaatctttttattgtggtaaaatacacataaggtttaccattttaaagtgtatagttcagtgtcattaagtgcatacaaatctgttgtgcagccatcgccaccatccatatccaggactcttttcatcttcccaaactaaaactttatacccattaaaacattaactcctcattcctgtctccccagcacctagcaacccccattctactttgtgtctctatgaatttgactcctagatgtttcatattggtggaatcctacagtatttgtcttttgtgactgttatagcgtatgtcagaattttctttcttaaggctgcataatcttatgtatgtaccacattttgtttgttcactcatctcttgatggacatttggattgctttcaccttttggctatttcaatagtgttgctatgaacactgatcttcaagtatctgttcaagtccctgctttgaattatttttggtatatacctaagaagtgcagctagtgtatcatatagtaattctgtgtttaactttttaggaacaatcatactgttttccatagtggcagcaccattttacattttcaccagcaatacgcaagggttttaatttctcattaacactttctactttttttataagaattttatacttctaggtctttagccctttgatccactttgagctaatttttagtatgatgtaaagcaagggtccatttttttttcttttgtgtgtggatatccagttttcctaactctcatgttttgaaaagactgtacttttccccattcgttggtcttggcagccttgtccaaaatcatttgaccatatgtgcaggggtttacttctgagctctctattccattgatagaacccattagggtggatttttttttatttatacaaaaagtgctttagggattttgttaggaattaaatcttccaatccatgaacatggaatgtcttttcatttatttatgtctttaatttattttagcagtgttttgtagttttcagtgtaaaagtcttttgtctccttggatgaatttattccttagtattttattcattttgatgctactgtgaatggaattgttctcttaagttcctttttgggttgttcattggtagtgtgtagaaacaactgatttttgtgtgattttgtgtcctgtatctttgccaaggtaagtgattttattccctaagtgccgtgctaaaatgtttgtaaatcacctttctttcaacacctcacctggaaatctggtgagatcaggtttgacccttaggcactgtgccttacatgtgctgtacaggatagctacctgtgttggttatatcctgtacagccatatgtggtagacgttatgtgggtgtcaactctcttgttctcttgagtattcatcagcagaagacgaaaaagcagaatcctggttatttggcaaactctacatgttgtactccaaggtgtcagatcagcaaatacgttgctgcctgattcagttttggttgattcttcccctccgatatcattaatattctcaggagatagagtgaataagctattgggagagggtaaaagagatacatgatgtagggaacgtttttttaattgttaaaccagaagtgggtattttggtttgtgagttaaaatactgctggtattctaacttacgattagtctttaagtattatgtatattccacagtgccaggtgcccactgctgggcatgcagttgtaggtacttctttataactctggctagtttatcctgtctgtgcaattagttcatactgctgagcagctgtgtctccctgccttttacaattgtaggtatattgttagtgttgctgtgctcactaagttttgtgatgttttaaacggaaccaagtttggtggtattattattatttttttaaaagaaagcagttacttaaattaacatggtagaaaatatcctggggattgatggtgtagattaaaaatctttgttttatccaacaatagaattgaattatatggctaggaacaccagcaagcacttcctgtcacagttatcgaaacagtcttttaaagaatgtctagagggccttacttaaacaaatagcttgtcttgactttgggaggaggatggttacctaagcccatgtgttaaaacagacagatgacacactgaaatgaccaacgagcataataaggagaattcagtatccttggaaaccctggaacggtgccataactaaactaaaaaaattttagcaggaaacagtacaaacaagaaacatcgtgagagaaggccttagtgttcatttctgtggttgtgaagcgctagtaggagtaagtgacaggacctactttgaatagccagagttagaattgaagggggagccactggacaattggttcatgtattctgtactttgaaactgggattgaaaactaaatggctcttaccaagagaaatgtgaccagagaaatgtgacctgagagagaagcacaaagttgaaactctgcccccaggctgccttctttgtcaggcagccgcttaaggtggccccagtgatccctggcttctggtatttatgtctctgtgtaaccttgtccctttgagtgtttctggacctctcgtgacttgcttccacaagtggggcaagatgctgggatgctgcttcagaggttaggttacagaaaggttttggcatccatgttgggctgccctatttcacttgctgagggaagccagctaccatgtttgtgtggttccctgtggagctcacatgtcaaggatctgttgtctctggccaacagctggcgacctgacacctgtcagcagccaggcgcacgagcttggaagtagatctcctcctccagtcaggctttcggatacctgcaactttgtgagagaccttgaacgcaaggccccctggctaagtcacacctagattcctgacctgttatgagataataagtgtttgttgttttaagctgctacctttgggacaatttttaaggcagcaatagagaacttatataggaagtaacaatgtcaacatttcccctcctcggtctaagatttgaacttggttctaatgtgttttctggttgaacccaacacagtacccaatattacataaacacaggcccttttctttaaagatacatacagagaatgatagacacatccagattcagtaggtactgtaaaagaagttgaccagtatgagcagtaacttcctatgaaatagacttagtgcaggaaacaagagaaactgttgaagtttaaagagcagctaattagttgctctgggagactgatgagaatttgaaagaatcagagagcaggaaggagttcttaagtgaaatttgtgactctctggagtcaagtagcagcagggttttagaaatattccctcaatacaatgggaaaaagaagttgaaaattgtaacaaaaatataaggaacatagcatttgttttcgttgattttctcagttgcattgtgcacgtttcaggtgctcagtagctgtgtgtgactagtggctactgtactagacagtgcagaatagaacatttctatcgtaggaagttttgatggacagtgctgtggtagagtgtcttccagagaactctgaggaaaaaactatgataaactaagaatcctaaattgatgaagttatcctttacataggcagtgcaacaagatggctttttataggtgtgcaggaactcaaagtatatcactcgactacttgggaaaaaaaaaaagacttaactacacccagctgagtagttagcatctcagaagcatgataagtcaacttcagcattgtttaactctgtatcctgtttcccagaacaacccaaaacttacatataaaagtaggggaaaatcttcatctttgacagctattaagaggatgcccttcttaagccaaacttcagaccgtcagaacggtggtttcaacttagttcaattccagagcttcccctctccttttgacgataaataaagccacaggaagcagcagtttttaaagacattaatccattgaaaccacttttgctgaaatcactaaaaagtctccaagtcaccaaaaccaagtttcattctcagccctctcttgatctttaagtacctttggatgcaattcatcactgcctccttttaaaaacacggtctttgcctagcttccagaaaacttcttcctactcactagaagttcctgtgcagtctccttttttacctggtctccaggcttaatccttagcccagacctctggctttctttatctatacttattcactaggaaatcacatttaagtgtcatgtgactttaaatgttttctctgagctgatgataccctaattatatctccttttccctaatctgctgtcagatcaatctagctgactatgtagaaaacacacacacagtttcttgcacaacacttctgataacatatattcatctgtaagtttttctctgtacatcaagcaagcaatcagttttgcagcagacaccagctgggtgtccccccattcagttccaacactgtctacctggaaatagcatcatattccccaggttgmgggggctcggtcccacaagactgcccccactttttccaatgccagttggaagccccaggttgtttacctgtgcctctgaccaagtggccatacatagaggttaccaagacctccttcttgggttcgattaatttgctagagtggctcacagaactcagggcaaacatttaccactttattatgaagggcattttaaaggatacaaatgaacagctacatgaagagakatgtaggacaaggtctggaagggtcctgaatgcaggagcttctatccccgtggagttggagtgcgccacctacgcagctcctggatgtgttctagtttaccttcctggaagccctccaaactccgtggaggcttcattatgattaagtcattggccgtttgtgatctgctcagtcttcagccccactcccttccacttctctgtggctaccacctgagttctgactcctctactctcttaggctactgcagtaacataggaaccatttcttccttcctccagttttcattgttttcacacaacagatttagaacctctccagtgtcttatcacatgttaggacaagtccactgcccttttaccgtggcctacaaggccattgccaccatttgtcttacagagtctacattaatctcactggctttcttgtttgcatcaagtttgccagcctcttttctcattaggcctggcattctggaatgctttccttcaacaagtttggatggctcattcctatgtcttcattttggtttctgcctaagtcaccacctcagagaggctttctttgaccaccctacctgaaatagtattccccactccatgactttttattgttttagggctttatatttttagagcactgagcactgcctgatacattttatattattaatttgtttatagtatgtgtttatcacaagaatgtaagatccatgagagcagggatttttgtttgtcttactcttgtacctagaaatagtgtctaatacagcttccacgtggtgttgagcctgtgggtgcacagaagtcaagaactgaggtttgggaacctctgcctagttttcagacgtgtggaaatgcctggatgcccagacagaagtctgctgcaggggcagggccctcatggagaacctctgctaggacagtgcggaagggaaatgtggggtcggagcccccacacagagtccctactggggcattgcctcgccaagctgtgagaagagggctaccatcctccagactacagaatggtagatccaccgacagcttgcaccatgccccrggaaaagctgcagacaatccacaccagcctgtgaaagcagccagcagggaggctgtaccctgcaaagccacaggagcagagctgcccaagaccatgggaacctacgtcttgcatcagcatgacctggatgtgagacctggagccaaaggagatcatttcggagctttaaaatttgactggcctgctggatttcggacttgcatggaccctataccctctttgttttggccaatttatcctatttggaatggctatatttactcaatatctgtacccccactgtatctagggtgccttgtctcagatgcaactttgtactgtggacttttgagttaatgctgaaatgagttaagacgttgggggactgttgggaaggcatgattggttttaaaatgtgaggacatgagatttggaggggttggggcagaatgataaatggttttgctgtgtccccattcaaatctcaacttgaattgtatctcccagaattcccacatgttgttgtgggtggacccatgggggggtaattgaatcatgggggctggtctttgctgtgctattctcgtgatagtaagtctcatgagatttgatgggtttgtcaggtgtttccacttttgcttcttcctcatttttctcttgccgccgccatgtaagaggtaactttcacctcccgtcatgattctgaggccttcccagccatgtggaactgtaagttaaattaaacctctttttcttcccaatcttgggtatgtctttatcagcggcgtgaaaacggactaatacagttgtattccctgtttagatgctgttaaataatatttcatgtaagataagtatctgcctattaatgatattaggtgcattcagctgcataagtacctgaacattattcttggctttcatctgtagctgtccacactttatcaattatcaagccttgttttatgtactttggaaatgtatcttaaagtttgttcacttatgacccctctttggccttggtactttaatttcttcatttgttaaatgggtatattgatacagccaacttaatagttttgttgtgatgattaaatacctaacatagagtatgtaaactttacttatttttatttattttttattattttttgagatagggcctcaccctgtcacccaggctggagtgtggtggcgtgagatcttggctcacagcagtctcagcctactgggctcaagccatcctctcatctcagccccacaagtaactgagactacaggtgtgcgctgccatgcctggctaatattttgtattttttgtagagacgggttttcgccatgttgcccaggctggtcttgaacttctgagctcaagtgatcctcccactttggcctcccaaaatgctgggattataggtgtgagccaccatgttggcttgttaggtaaatgttaaatgttgctgtctaatgataaccatattttactattactggctcaggtcactatcattgctaaactgggatttctgtggagtaactccaggttggtctccagttttccctttgcttaggttcctcccagttctcagtctccttcacttcagtttgagcaatctaaggtgcatgtctgactggattgcttttacttaaaattcccaagtggacttctttttgtcattggaataaagtctgtaaaatgttttgtaacataccttaaagactccgccattttctctraatattttgcctctttgttttcagtttgtgggtgaactagaacaattctggcaggaaacaaactgtattgggtgtgactctaccaagaaagatggatagtgaagtgctttctgattcttatagcatagccatagtaatcctaatttgtaaagattttagggagatattaatagccagatacccattctaattataaaaataccttaattaggcatacatagatgcaagagtttcatactgtactacttgtttgtataatctccttgagaagctatttacattatacttaataaggccactgaatgaggtggtttgcttttgtgaagttaattagccagttaaaagttgaggaacatctaatgaagatgataactaactttaagtctagaatgctcaatttagagctcttctttctaacatatgtaacagttatataccagggcttattgtctgtttaaaaaaccacacctatagactaaatgtattagcagctgtttatctttctgttcttggttgcagtaggatatgattccattccattttatccaaacgggctatcagattatccaggaacaagttacaaagaagggaaactggttccaggacacatctctggaagttaccttgtggaccctgagaatgtgttacaggtgtgccaagatccttcagcccttggaagcgggtgcctgagtggggtcttagctgactagagtgcctgggcagacaagagcagctccatcttctctttagagtatgttacataagcattaaatcgagggtgtgccctgacgtaaggaaagtagaagctcaccagcctgctgcactcacatcagcgagagggaacatttgcccctccatgcctactgcccttcccgcccttcagcctcaggttacaggaataaataagttaattaatcccaagtggggagagcctttgaagagtattaaaaggagaggaaggaatggttggaacctgttcccatcaggaacagatgagtaggtcaagctttattcacttttaaggaggaagggattcctaaaggacaaaccaaacttgcttttcagggcgttacaataaaacgttcttaaatcctgaatatcacacatttctgggaggaatgtcctgccctttgggaaaaatagcaagaacttcgagctccctctagaggccagcagtgataaaagagcgtcgtagtggtctgtagggaaatcattttacaatgattagctaagctacctttcagcaagaaactatcattttatagatgtattatccagtaaaatgttctcttatattgggaagaaattggtgcctttgaaaagaaatttgggttaatcatactctaattagctatgaggggccaattgtaaagttcatttactgtgtagaaatacagctgagaagatcatgaaaatgggtcatgtgacctaacagaatagtatattctaaccattggaacaaaccagatcaagatgagaacctgatttctgtgctgttttgtgccggaatgtttcgacagtagacctttgaattgaacagaggtaaaggtgatctatagtaccagctgtgttctcacccactcctccccctcatctgaacaaaaccagtgagttccagaagattaatattaggaaatgcaagatgcaggcatatgttaaaatttctgagtaagctaacatatacagtttcttaactttttcagagcctcagtttactaaatgatccatctattattccaggatagacattttagtcataaccatatatgtcaaggagttagttatgggtttaaccctttgatgtatttagtccttttgttctcaatatatttatacttctttatagaactcactgagagagttcagttctaaaaacttagtatgaactatagaatgacagaagtgattttatggtaatattaatatgtaaaagttgcattcccaccaggaatatgtgaaagtaattgcccaatacctgcactaagtattgcctctttttaaaaaaatcttaatcattggaatggtgtgtagtggcatatcatttttccaccttgtggaaatccatctattatcaaagtttccatggttttatgcaaatagctatcaaatacctgtcacctggtttctctttccgagctctggtaactattccataattccctgattgttttatttattttatacaaacaggatcaaatgtactttgtaacattttaaaaactcggtgatacatcgtagaccatattcttagagatttgttatttttttgtactgggtatgtgcaagcacatatggccagacagcagaggaatatttactaaaataatagtggtttcctcagaagtggggttaagagtgatgattatcctttttctacaaagtagtttatttgtgagattaaggaatgaagttaattttaattaaaaacctatgttatgataatctcattactacaagtgatctttaaaaatcatattgtatataaacacatctgatacataatttgcagtttgcatgaatctgctaaatgactgttccaggggtgagatttcagggtttcttacactttattttttgtgaattggttagtttatagtgataattgtatcttttttatgaacataatgccatcttaaatatttacatatttagattcctataaaactttttaaagtacctttattgcagtactgattttaaggttcctaagtggttgatttaaccattggctattaatctttagctattttgttgtggtcagacagtatggtctttataatttgatttcttggagtttctctgtgactcttaattgcatacctttttagaagaaatatatacttttaatttggtataatttttctgtgtatttgtcatttatattttttaggtgtctatcccttctccctcccagctcccatcactgttcctgtcttctactacctttttttcaactccttattcctaataaccctgaaattgtaaagttaaaatctgcattgggcattgggcataaaaatttatgactgttacattctcaccataccttttatctacctacctgcatagtacaaaacccccttttcctattgaattctttttaaaaaaattccaccagactttggggacatcatctgtatttattaggcatgggtcaagtatgctagctatttggcagttagcaggacagttttgaacaagaaaaattgttcgatggtctgcatagcttagaatatactgccaaatgttcgtgatgctggaaaaaagcttggttattttctaagcctacaaactgttttacttaccaagggttttttcaggggatagaggccacgacttttagtactaaagtttactgtgtaaatcaagggaatgttatactttgaaatgttgggattttttttacaaagaattcttcacagttttgcaaaatcacatcactactgcaatgctgctaatggattttgagttgtgggtaccatatacccgtgtaagtctacatttaacactgaaccctttgtgttgagtactctgcatacagtgtcatcataccttgagtatttacatttagtcatcatgttttcaratagtcccgccctgccccttcccaggactgcagtgatacttacgttagagcacttgatgttatcccacaggtcaggtcttggttactttttcttcctgtctttgctttattttgttttgattatagggtagttcttcaacttcttgatattttccactacagtatttaaatctgttagtcttatccaatgtatctttcacttcaaatagtatgtttttttatttttagtcacatttttgtctttcgtcttttatttctcatcatgttgatgatttattcttttttcttttttytttttttttttttgagacacagtctggctctgtcgcccaggctggagtgcaatggcaccatcttggctcactgcaacttcacctcccgggttcaagcgatcctcccatgttcaagcaatcctcccacctcggcctcctgagtagccgggaccgcaggagcacgctacagcacctggcttagtttttttgtttttttagtagagacagggtttcatacgttggccagactggtctcaaactcctgacctcaagtgatccacccgcctcagtgctgggattgcaggcgtgagccactgtgcctgggccatgatttattcttgatcatatggagcatatttacaaaagctgtttttggtccgtgtctgctaggaccttaattctttcatttttgtcacttctggctctgtttacactggtttttcttctgattatgggttgtattttcctgcctgtttatattcctggtaatttcggattggaaaccagacagtgtgaatttacattgtagagtgttggattttgttctagcacatagttgagacacttgggatagatttgatcctttccaaggatcaaatgtttgttgttaaactttgttaggacaagtttagtctttagtgctgatttagcctgattactaaggtgtgacactcttgtgagaactctacctgctggtggggatttctcttctctggctggtggggaccctaatttttcagagcctcatgtcacttcatagatgcccagatcagtattcagccaaagattctaagtgagccgcctatagataccttttttggggtactctgcctttacgttgtagctgctttaacctctggcctctggattcttcataactctcaccatgctgtcttggtgcttccagtcagtaagcaagagctactacaggaatcactttcttttcctttctaagagtatccaacccacattcattgtccgttgtctgaaaaacagttgtttcatatattctattcagttttctaatctttcacagcaggacaataaattcaggttatcttaactcctttgtggccagaaacaagaccagttatcagatttttaattttgatttttatcttttactttaacctcttgaaagtagtagtggtaaaaatcacacatttttattgggtactttttctgaatacctttgtttatgtagtcttagtgttctttgttagtctttgtcttttttactgaaatataacaaaaagtagaggagactgattacctagtagagctttacaggaagtcaaatgttatttgtagaaagatacgagttattatagccagcttgacgagagcattttcttccaggtatgaacatttaatttcgtattagaatactacattggcagccccatttgtttgtagatacgtgctctttacacaaatgcagccctttgtggcagtatttggaatacagaattttaagaaatagtggttactcaatagaattttcacaaacttcatgattatcttaagatttatgctattttgtgttgcatgaaacagatatttctggattttcagtgttgtttatttgctacagcaatgtttagagtgttttatgagttttaaccttttaaattgttactatttcactgtaaagcctaattatattgagggaaataacagaatagggtttgtcagcatcttaaggaatggatcctacatcagctgtttcaaatggcactttcaggaatctataaatcagatggttaaaaatacttaaacaggccagacgcagtggctcacgcctgtaatcccaatactttggaaggctgaggtgggaggatcacttggccaggagttcaagagcaagccggccaacatattgaaagcctgtctctactaaaaatacaaaaaaaaaaattagctgggtgtagtggtgcatacctataatcccaactgctcaagaggctgaggcagggagaattgtttcaacccgggaggcagaggttgcagtgagctgagatcatgccactgcactccagcctgggtgacagagcaagactcttttgtctcaaaaaaaaaaaaaaaaagaagaagatacaaattgatatcaaaataccttttgaaaaaaaaatacttaagcaattcctctcagttgtttcttcccctcctttatttttatttttttaaaacgggcatttacatattaacttggtccttatgtcttgtaattcatgctgtagttgtttattttgccttaggatactcctttgatttttcttaagcatttactgaatcctttattggttaatgcttcatctgtagggattacagtgctttctcttagccacattagggggtagaatttagaatgtgtatcacccagtgccttgaatgtagcagattctgaataaatatttaaaagttgtagggacaggcagtaactgtaatgtggtcattaataagtagtataaagttgatgttgcttggctctaaatattttactaaacacagacattttgacaatgaaaaagaggcaataaactgaatacttacacattatcccttttttcatcatccagagatttatagaattctgtgctgccaccttatccctatagtgctaaatatgagtcctgagtctgacagttgatcactgtgtgatttttcttaggctggttaatcactctaatttgtttttctatacattgaaaatgatatgcatattacagtgatgttataaagattaagagagaataaatgcccacttagcacratgtttggcacattttggttgtaacatctgtatgtgctttggcattagtttgatatgactttgtgttattttaatgccagtatccagttaatataaagcagagtttggcaaacattttctgtaaagggccagatagtaaatgtttccagtctgtgccgtctattcaactcatgggcatggctaagttccattaaagaattatttacaaaaacaggttgtgggccgtagttttccaacctgtgactagaggttasttttgtatttctttgtcttttttgtttttgttgctgttttcatttgacagctttggtacaatgtatttcttaactattgagtatttcaaataccttcagctgtattaaaaattatataggtaatacagttataaccctctttgcactttgattaatttctttcagatcacttatttgagacatagtcctcaagtggaattatgaaatcaaagagtgactccataaagtgcctcacaacacaagagctgaggtatttagagaatgccaaggctactaataatttagtcttttaatggatagtaattatttgttacacccatttatatatactatttgtgaatttccccttgctgatttttatactgagagttacatttttgaacctttggctgtatgtgttctattgtgtttcttataatacataagaaacagaagataggtggcaataaggaaacggccttatgaagtaaaaaccgaccaatgacactgttgtcattcccactaccaattgctcttccactcacaaaagaaagcaattatttcaccttctaagagtgaaacctgcctgggtgctgacagtttagaaagagggggtggaaaaagtaagaatttcattctgtataataaattaccaatcccttggtttgcattaatagtgtatagataaaatttaagaacattacattactttttttttaacaaaaatactcttatgccttttaaatactacctttatatcgcacaatttggaagtcaatgtgtatctaaaattgctgggttgacttaatgcatagtagggcagtggactaatgttctgaaaggtccttctttattaactgtattagaatgttcttttgtaagattaatacaggcatttttcattgtaaaataacattgtgattggtsataggacagatttttccttttaaagaagttgtttgttctttggcattttggtggtggtggtttgtgagaatataactcaactgatatactatactaaagtatgcacaaattcggtatgatagctctgacagtgatgtcagtttttgcttttaaaaaacatgatacacagtgcattgtttaaaggtgcagaattctcaaattccagcattcttgggtttgcaataaaagtcagtatccggccaggtacggtggctcacgcctgaaattccagcatattgggaggccgaggtaggcggatcacaaggtcaggagattgagaccatcctggctaacacggtgaaaccccgcctctactaaaaatacaaaaaattagccggtggtggtggcaggtgcctgtagtcccagctactcaggaggctgaggcaggagaatggcgtgaacccgggaggcggaggttgcagggagccgagatcgcgccactgcactccagcctgggcggcagagtaagactccatctcaaaaaaaaacaaaaaacaaaaacaaaaaaagtcagtatccactctgtaatgttttagacctgtgctgtccagtctggtagccgctagctacatatgggtatcagaacatgagaagaatattttctaagagtagattattttctaaaaacctggataccagtatttagccagccctgtttgggtgtagcatgaaatggtatccctgtttgcaggactgtgcttcctcactttttgcatgtcatggcattcctaaaaagcagcgatgtttgtatggcacactgggatacacagccgaggatgcttacaactagggcttaccgatctgagtgctctgcagcaccaggcaagaccataccccattcttggcatgccggtatgcagtggcacatacggtacaaagctgcttcagcgtgctccctataactcattcctggatgtttttcttggtctatgagcggaatttgaattcattctcccttcttatttcatcatttttatatgtcatattcccagtgagactgtgagacattggcatttcacaacttagaagagctttcaaagcatcatccataaacttagagatttagtgagtaactgtatatgatctttctcttctcttttgtttaagggagaaaggaggaaggaacaccatgacgtagtgatatatttaaattctgttttagaaaccaggaaaatagttttcctaccagaaatatgattacattaaatatatgcggtataaagatcacagcaaggagaccatgaatctgtccatctacccctccccgaaataaaattactctacactattcagataaaaagtgacttggttggctgtttctgaaactttctgtttattggcttttggcaagataaatagtaacaaacaccagtgtcttaaaatctaaaaattggtaatccatgtacctactgtttatttccctcaaggattttacagtgagttgacttttgtggtgtaaatctttggttcttgtcctttcctgatatccagccacttgctgtttgggccagttgtttctaggattcctcaccctacacaagggtccctcttaaaattctttacctttgctacaaaactagttcactgctaaacacataaccacatcactgtacgctaaaaatgtcatcataaaataattgttcctgccataagaagtgatacgttattggagcaaatgtcttgtttctgttgcatcttgcaatcaagtctttttcttctccccacacacccttcaccttcctcttccattcacatgttcagtgattacattataactggttgtgagagtcccctgtcttcagtttggaatattgtacctacaatcattacttgattcttgttctgtcttctcataataaaataggtaagggctgggtgttgtgttttgtggttcatgcttgtaatcccagcactttgggaggtcaaggcaggaggattgcttgatgccaagagttcgaaaccagcctgggcaacatggcaacaccctgtctataaaaaaataaaaataaaaaaattagactggcatggtggtccgcacctgtagtcccagctacttggggagctgatatgggaagattgcttgaacccgggaggtcaaggctgcagtgaggtatgattgaaccactgcattccagctggggcaacaaagcgaaaccccatctcaaaaaataataaattggcgtggaatgtgccttcccaccccacccctcagtctcaaatctcaattgttttactgtaatgctgtccttactgacttaatcatctctaggttttacgtgttcagttcacttaaggaatattaaggtttcttccttattagaaattgagcccggctgggtatggtagcgcttgcaaacttccagmagtttggaaggctgaggtgggaggatcactgaagaccacaagctcgagactaccttgagcaacatagtgagaccctgtctctacaaaaaaattttttaaaaattagccaggtatggtggtgcatgcctgtagtaccagctattcaagagactgcggtgggaggattgcttgagcccagaagttcgacatgattgcaccactgcactccagcctggtcaaaaggcctttttttttttttaaagactcttttaagaaaaaaaaaagtccatgctgcaccaaacctacctgtctaactttactgcttagcagagagtgtagtcaggctagtcacgccatggtccttgacatctccttactaagtgatagttgtaacagctcatcagcctgacaaggagttgtaattaatttaggtggatgcaacaacttggacctgggaaagagataaaataagtaatgggcaactcggcccattattccactgagttgaacaggagaatgagtctggtattggtttcagatgtgagcatttcaccaagctgagagcatattctagagatcaaagataggtattttggtacagcaagatttcatattcaaattaactagttcatttgatggttaggctaaaaaaaacccagcaaattatcaatgctgtagggaaaattgagctggacttacgagaaagaatttgtgtcttcagggtgtctgtgtgagggatttgaatttaaagataatcttgactctgtatgtttgtattattatttgattttagagcctaaccctcagatttgattcaatattttttgtctgctactctttgctcctacttaactccccagttgtactctaatgtgctttaagtgcagggactttgtatatttttaatcctttattcgctgtagaagtcagtagtatagtacagaactcctaatcaaatgacttctcagtacttactggtgtttggctttatgtactagcccagtatattcagttttacgccttttatgttacttaggtaagcagttactcaggtaaccaccgtggtgtagccaggggttttttaacctggcgttgagttgttgtccaaacagtctgagataatatgcacatttttatgagcacttaaatatgtgcagttttgtgggagagcatttgtaacttttggtagattctgaaagagttcaaaaagattaaatgccttggacctagacaacggaggaagaaaagaaaccttctcaaaatctgggctttaaaaaattgctaaaagaaaattatgaaatgcagtgctggatagattattggtgaaatacatgtcagtaaatttaaaattttaaagtatgtatatcatcagattcttaaattcttaacagtgagcttctgtagaccagaggatgtctgttcttttataaagctgatttattttaaatgcacatgataggggcttttctaattcagcttaatgctttatagtgaagaacttcttaatgacacagtgatgaattttaccatgttactgctctatcttatgcccatttctgtaatttagactttttttcttaggaaaagggctctagtgtgaaaaaccaagaaaaaaaacttgacagttttctttgatcatgactgtgaagtcagcactgagctggtagaatccatgtgacgtgactgattctagtggtcctgcagtgtaggggagctggaggagccgtgcacattgaaggcacatagcacgaagcatttctgctataaaaaagcgggatctatttgcaaacacttgtttgaagccatgattttgaatttatgacttaaaattccatctaaaagtatttttacatttaaaattccctctccttattagtaatatgtgcctttattatagatgattatttgcatttgcataaacaagcttatcaaatgtatataagaaaattagcaagataatgtttaagggtgctatcagaatgattcacaaattgttgatttctttgcattcacaaatttagtgaaatgttaataaattagtatttgttgtattctctgttaaaatagtttcatactggtttattctgaggagaatttttattagtggatcaaaatatttatgaaagaactttagattcatgttatttctgatgggtggttgatgtacttcaaagatatacttcatagacttggaatgtttgggaaaacacgctaagttctgaaactagtgagtcgggaaagaaaaactaatatctttttttgttttgtctcaattatacagcagatataatttctacagtagaatttaatcattctggagaattactagcaacaggagataaaggtggtagagttgtcatctttcaacaggagcaggaggtaagtgtttaaagtttattgtctaaatttcagtttgatcttaggactagagcttgtgttgcactggagaatctcatcagaggatgttggaattttaaaagaagtgtgtgtttattgaayacaatgtccwatatatagacagctctggttctcttagctttgtatgtgtgcatgtgtgtacatgagcgtatgttgttttggtttaaaaacataacactaattgtaaaaatasttgattagagaagggggtggaaagtgatggaataatccaagattttaacggttttgaagccttggcccttcattataatttttcctttgaaactccgtaaagcaaagttgctttgacttcttctcaatgcttggtttactttgtacaattgaggggtgagaggctagtttaaagaaaaagcagctcaattattttgatgtcagttcataataatactgttacaatgatttaaatgtaaaggtttaaatgacagttgcrtgtacatgcatgtaaagtaacttaaaagtgcagtgctagctttttgaagaaagaaaattgcagaatcggtaattaaagtgggcttttgttttgtttttcttacaacttaggcacacttctaaatttaattgaccagatttctcactaaaaattttttgctaaacaaaatttgtcacacttggttttttcttattcattctctccttccatttgtagatcagagtttaaccattaaaatcagttgttttggaacattctgcccctatttataatatatttaaaaagtttaaagtaatgtggataaattgcagggttttacaaatacatgtctaaatcataacacagagttaggttttaaaggattgtgaaattccttaaataagcaaagaatctagtaataatactactactttgcacttctatagcgcctttgacctgaggatctcaaagtgctttacaaacactaatgaattaatcctcacaacaccccagtgaggtaggtaatttaattttaaaagaaatgattaatagtgtctgattagaagatgcacaaacactaaatatgtcttttattatttttttcgtttggaagaaaatatgaaaataagactcaagctttgcttgacaaagaatggtctcgtgggaagtggggggctaaatcagttttctgtttttaagtagccaaaaactcgaccataagaatcttgacatacttagagttgacatggaaccttacattataatttcattataatttccctttatttactaacaggaaagtcaagatataaatagattactttattacttagtggcagaactaacaagcagaacctgaacttttgacatgtcgtttttcagtattctttgctgtttttcatgctagataaccaaaatgtgaaagtttttatctagagtttagagcagaccttcccataggtgttctctgcccttgaatgtattttttactgaaagttattgactctctacactttacttttattttaaagaaaagtgtttgagaaaaactcgtaaaaattgattttgccctaggcttaacattctgagggtttcagaaagtcttcatttttaatgaaggcattgtgtcattgtcaattctaaaatacaagtttgtcaattaaaagctaatttggaactattttgcctgagaatgaagtcattttcatctcctgtggtcgtttgttgtccaagtcaaaatcaagtgtggaaaaaatggctgaaaatttttttaattgggggaaatgtttgttttaatatgggtttagtaatgtagtcagaatattagtatttagtattttcctaaaggctgttagtaatacattaatttgtaattaaattccaaatttaatagttactgaaattactcatttacttgtattagaaaataagacaaaattattttaaagataatcatttcccgtgattcttttctgaaaccccactgaagattctaaagtgctaatattttaactacattttcttgtaagaagaattgagcagaataactttttgggaagggccattgataggaaaaataggacctccttttcatgtgtctcattcttcttaactatatttaagaattctagatggagagttttgtagaaactcagtaacatgtcttttgagaattacttagtggtgtaaatatcagcatgtttttaagtgatagattaagtaaagatgatgatggtgattgactcttcacttctgaaacttgatcttgactattaatttggtgtgttttgcctatttaattttctacattttaaagccctgtcttagagtttctaatacagtattgtcttcagaatctatgtcattggtcataaatatgtatacttgacacttagaggcacctttgtttcaatacctaatgtaattggatgagattttatgaattcacatctagaggcacctttgtttcaatacctaatgtaattgaatgagattttatgaattcacatgtatatatctgtaagatagtgttacagtttgaaaagtgaaagaaatagtcctttcctaatttgtagataaaatccaaattatttaacaaggttatattgcttcatttagtagcaaaaatcaggttaggatttgggtctccgattttcaatccaactattatatgttcattccagagtacactggtgcctaatgtttcttagactctgatgagggtgctagccttgtttgcagaatacactggcatttgatctattgtggctttattctcttacctagtggcagggttccttcttaaacttgactttactggagaccaaaatatctccacccactcatttttattgtctttacttggaagaagaagagatcatataacagcaacagagaacttggcacatcagactttgacatctgtaacccctcattgtctgcctcatttattttacccttcagaagtagctagtctccttcctgtgatccaggcgggtatctgtgtcctcttgctgcctgtccgtttattccccaatcgtaatataaagaaactgagtagccaattcagagggtcttcatttggtttgagtatgtttcagactgataattgtttaatatttttagctgtcatttaatagcattgttataactaatayatttgtataggtattctgctacacggaatctctgttgtagaatcagggcacctaaagaaattgaggcacacaagtaaagtgatttccctgatgtaatcacagccatcatgtgatcagtgagagtccaaaattctgataacaaatccagtgttctttatagcatgacccgatataagtgacccatgttatttttatagcttctaatagcttttgacagcaaagtaaatgatagggtatattctttttgttaatgraaatattaatacagggttttgaggagaagagtccaaacagctattaaagtggataatgatgttctctaggttttagggatttttgttgtttccatgggtgctcaaattaggtaattagcagttgtcaaagtagctggtttcctactgagttgggttgctcagaccttcagtttctctgagactttgtgatgtaccctgtaaggtagtgtgggtgtgtgggtgctgggttaaagggacagctaagacagaaggtgaggagggaggttgtacctctttccacttctttttataatttttctaggttggtatggggcctttgatttttgttttctagggctgctggtaactttcttggatttcataccctctggctttttttattcttaatgtggtattcccaaaattccttaacaggatacagaagaaaccttaaaaagcatgcttttcacaaaaggtggatagtattgttaatatgatagtattacctttctaaattatatatggctcaaaatgtttgcatgtatttaaaatgcagatttctgggttgggggccgtggctgatgcctgcagtcccaacactttgggaggctgaggcaggtggatcacttgagggcaggctggccaacatagtgaaaccctgtatctaataaaaatacaaaaattagctgatcctggtggcacatacctgtaatcccagctatgtgactgaaatatgaggatcacttgaacctaggaggcggaggttgcagtgagctgagatggtgcctttgcactccagcctgggcaacagagtgagactgtctcaaaaactaataataaaaaataaataaataaaatacagatttctatcctgctcctcaagattactaaatcagaatatgtatgtatatggtgcattcatagaatgtaagagctaacatttatagggctttctagggattcttaacttttttgttgtcatcccatggattcctttgatagcctagtaaatcctgtagacttctcagattttttttttttttgagatggagtctcactctgttgcccaggctggagtgcagtggcgtgatctcagctcactgcagcctccaccaccagggttaaagcagttctcctgcctcagcctcctgagtagctgggactacaggtgcacaccacyacacctggctaatttttgcatttttggtagagatgggttttcaccatattggccaggatggtctcgatctcctgacctcatgatccacccgtctcgtgatccacccaccttggcctcccaaagtgttgagcgtgagccaccgtgcctggccagaatgtttaaattgcataaaatatttaagattataaaggttgaaataatttaccaaaatattcataattgagtaatatatgttttaagtggataacagctggattaygatattaaaatgtcatttctgtttgacagagtcacaagaattgctaatactatatgcagtttgttacctatgcccataatcaaaagaaatgctgaaatttagctggaggttagtgaaaataaatgtgtacattttccccccatccaggcttataaaatccctgggttctgtcattggacccttgtgtccatgagccctcaatttttaacccctggtagtgcagtctccttttgccagctgggggcccaggtaccagattacccatccaaagtcatacagttaataaggaagtgattcttcactgcagaagccacacatcctgatttctactgcatggctttgcccactctaacctggatgtagtagcagcagtttatgtgctaggacctctgccaagatccctaaatcttacttaatcatcacagcaaaataacaaagatgtatgtatgtttactatatcttgatgtattacaaatttataaataaaatgagatttagagaggataagtaacatttccaagagcaccctgctaggtaagtgggtaaaagctaattctgtgtaaatttggatgagtattcacaatgctggctattgatattaaaataaaaaaaactttaatcctgtttggtgtgatgagcctaattgttagaaatcacacaggaaaatcagtctcattactttatacctaatgaggaaagtacgtgatccttagactttttaatatgagctattgagtgatctgttttctgtcataggtgttagaggggaaaatggactaagagttgaacagccttggttctagtcctggtattcatttatgcatttgcccagccatctcttcttgttcagccttttagcgtccagatttctgtccagactgccatcagattcttgtcagctacctgttaatcttttggggctccttagggtattacatttcccaaaagcaaaatatcatgtattttaaatatttaaaatatcggctcaatgggtacctaattttacccgttgagcagaaatttgaattaaccatatttcttatacagggtgagtatcccttatctgaaatgcttggaaccagaagtgtttcaaatttcagatgttttcggattttggaatatgcgcatgtgtacataatgagatatattggggatgggacccaagtcctaaacacaaattmaattgtttcatatacaccttatacatatgacctgaagataattatacaacattttaaatcatttgtgcatgaaacacagttttgactgtgacccatcacatgaggccaggtgtgaaattttccacttgtgtcatgttgacagtaaaaagtttcaaattgtggagcattttgggtttcagattttcagattaggtatgctcaacctatccccaagaaattctccaccaaaaacaactccaaatctatgaaattaataatgcccagtaattttggaattaattatttaattaataaacttggaatttatttacctttccttcttcctgtgctctccctagcctcacacatataaaacatttcattgtattcttattattaataatttttccctcttaattataaattcattatgctcgatgtagataattcagtaaatatggataagtggcaaagaatgcatgtataaccccaccaaacaaaaataagaacttttggtatataccaaaggcctgtctttctgaatatctgattataaatttagggttgtatgattttttttctcacatactgtatagtgaataccttttcatgtcattcarttttctgtatcaccatctctgtaatgacatgacatgacataattakgtttatttgatctagtctctattgttagattcctagattgtttatttctgcctcttttttcagggttgggaggtgagcgactgcscctttgcagttactgtgtttttccctctttctaaaaaaagaaaagtagcaacttggtgattgaaaatacattatttcattggattttggttttactttacgccttaatactcccaataattaaagcatcttgttctatgccctctttttctagtggtgtatttattgaatttggatgggccacatattgtgagagacggcatcagctctttttctcacgaggcattatgtttttcagctttgttgattggctgcctttaaattttattttactttttgtttttctgcccacagattatttaaacattcttttgttcccttttaaatttattatttagttagactttattaccctacattatgtgatgaagtgatttttttctcttccaccttccccacccattcacagattaccagtcgggttattattattattattattattattattatttattttagttttacagagtctcrctctgtcaccctggctggagtacagtggcatgatctcagctcactgcaacttccaccacccaggttcaagtcatccttatgcctcagcctcccgagtagctgggattacagacgtgcaccaccatgcctggttaatttttgtgtttttagtagaggcagggttttgccatgctgaccgggctggtctcaaacttctggcctcaagttatctgcccacttaggcctcccaaagtgctgggattataggcatgagccaccacacccagctggttattacattatttattgaaattttttcacatggatttaaaatgcacattagatcagtcatctgcagagttgtgtctagacttcactatattttagcttttcaaagtcttattcaaggatgatgaactctrctagtctttctactttattcgttccttcttacagttgagttgtgtagataggttttgaaatgtattgaaattgggttctttctcaaatatctctctatagcctttcagagtaaatacttgatcagaatagttgttgttgcatatttcttagtgtctagttattaagaaggatttgacttgtgcctttacaaaggggaattttctagcgaacttcatctgtagtcaatttatcaggggtatggaggactttcttattagaatgttaccagtggaaaggacattgaagactatctgatccgatcttatttgttatttctccaatttgaggcacagagaagagtctgaaatcaggcgcctcaaatgtcggggtgtcatgcatttacctgcatcatgttgtttctaaatgatagaatttgcacttgatccttatctggaagagaaactaatatttgaactttacttgcttttgcattaaattcccaaagttatcctgtcctgagagaataaattgtatttaacacatgaagaaaacgtgatccaggggattgttatattttatgaacttcaaagggaaagagacacaagtagtaaaatgaatctttttttttttttttaatctaacaccaggtagggttcatctgaatcttctctcagagagaaaccaactccttaagggtccaggttagattgaaattccattttgagagaaacaaggttggagagccttgagatctgcctccattccttggttgttgatagaactggggaagagcgctagcatctgagcaaggcacagttttcgtgtggggtgtttgtgtgtgtccacgcgcatgtgcatggagggttttttttttttttccattcctttcagtaatgtgtaaaatgtagaataaataagcattcctcctatgtaactttatcacttaatctgtagcatagtttagaacagatattctagctagtttgataatctgagtgaaagcactttaacaactttaggttttaaagcattatattaattgtattttatgcatttcctttaaattttatttgactatcttatagacaaataataatgctacttgatttgactttctaattgtttcaaccaggtatccttcattcagatatctctcccactatattattgtttttttgataggatattgtgactgatacgcttccaaattgcacttagaatagtacataataggcactcagtgaatgagtattaacttactgaacataatttaataaggccttgcaaaatcttgaagtgctccatgactatcgttatcattagtttagagaaagttttgagatttctcttgtgtttatttcatcgaatgacttgtattttgctttattctagaaagttccccatattttctgaatgtgttgagagtagttatcagatatcatttaattttgttttgtaccatttctgccactgtccctgaatgcccatttcacaagacactgactcttttaaaatacttttatactgctataaaatataaaacaaatgactgcttacactatatagaagatgaacattaataaacagtaagttttagtagggttctatttggaggcttaaaaatattcatttattttctgctatatgagatcaaagtaaaatacatttattattttcttaaatttttaaattttttccacggagcaaagtaaatatttcctacatttttgcagagtttcatttaaggaaggagaaagttagtacaggttgagcattcctaacccaaaatccaaagtattccagaattggagacttattgaatgctgatgtgataccacaagtggaaaattcccctggcctcatgtgatgggtcacagtcaaaactttgtttcatgcacaaaattaattaaaatgctgtataaaattactttcaggctatatgtataaggtatatacaaaaccactgaattttrtatttagacttgggtcccctccctaagataatatyatgaatatgtaaatattccaaaatatggaaaaaaatgtgaaatctgaaacacttctggtcctaagcatcttggataagggatactcagcctrtaaaagcacaatggagttacttatatttagaagtagctgttgaaaaatgttaagtgaaattctttcagaagtttgcctttaagtcttgactattcttagtatgtttattgcagaaaataggaaaaatgtgtatcatttccacaaagaataaaatcaaaaccatcccataacaggaatgaaaaatgaagacctgtgtgtgtgtatgtatgtgtggttttctcagggatttttgttttgttttacagaatgagactcatgttgtacatatcactttgtaatgtttagttttatttactgtcaatgttttctcaggttgaaatattgcctcccagtcagggagatgaagagactgttggaaccattgagtagaaaggggcacttgaatagttgggaagaacatactccatcttataacttaggtgacaaggttcaataaacttgtggcttgtgggaacagcttatacttctaccagtagtatgtgactttgcctttctgtcactaaaacaatggtcattatcacatttttaattttttgttcatttaagggaaaataatattgcttagttttggtgggtgggtagatgtgtgtgtgttttgttggggatttttgttttgttttacagaatgagactcatgttgtacatatcactttgtaatgtttagttttatgtactgtcaatgttttctcaggttgaaatactgccttccagttagggagacgaagagactgttggaaccattgattgggttacttccaccttttggctcttgagaataaagctgtaatgggcatggctgtccaaacacctctctgaggtcccattttcagttctttgggataaaatccagaagtgggattgctggattatatggtagttctatttttagcttttttgaggaatctccacgttgttttccatagtggctgcaacatatgtgtggtatatattttaaaatctttatttaaatatacactgaaaagtacataaaatactagcagattattacatagcaaacatttaggtcaagaaatagaacttcctacgcttccacaaacccttctcttttcccttcctctcctttatgagcctgtcttattaatgattattttggcctgcagttttagaactttgaatagatggaatccacagtttatccattatgagtaatgttgctgtgaacattcttactcatgttttttgctgtacaatcatgagtagaaatattatgcccatagggtaggcattcactgttagcagacatcacagtaaaaagttctgctaattttattcttgtgaacagtatataaattttatggctgttctacatctttgccagtgctatgtgttgtattatcagtcttttaaaatttaacactttgtgggtatgaattaagtttgtatttactgtttgtttgtttttttttgagacgaagtcttcttgctttgtcacccaggctggaatgcagttggtgtgatcttcgctcactgcaacctcctcctcccatcaagtgattctcctgactcagcctcccaagtagctgggattacaggcatgcaccaccatgcccagctaaatttttgtatttttggtagagagagagtttcactgtgttagccaggctggtctcgaactcgacctcaggtgatctgcccgcctcagtctcccaaagtgctgggattacaggcatgagacatcacgtccggccttgtacttactcttgtgattcacattgagattgagtagttgttgtgttgttttgagacagggtgtttctttgttgcccaggttggagtgtgcagtggtgcgcttacagctcactgtagcctcaaacttctggactcaagtgatccttcccacttcagcctccccagtagctgagactacaggcgtgcactgcaacacttgactaattttttttttctctctctctttttttggtagggatggtctcactgtgttgctgatcttgaactcctgacctcaagcaatcctctgtcttggcctcccaaagtgttggattacaggcatgagctgcsactcctagccagagctgctttttatatgtttattggctatttggatgttatcttttggaagtgactatcgaaatctcttataattttctgtgttgtgtgtcatttttcttactgatttgtagactttctttacactttttgtagatgaactctttttcagttacatttgttggaggatccaggggcagtggctcacgcctgtaatcctagcactttgggaggctgaattggttggatcacttgagcccaggaaattgagaccaggctgggcaatatagcaagacctcatcttttttaaaaaacaaaacaaaacaaaacaagaaaacccacacatttgttagaagtatttttcattctgtgacttgccttttcatttttttgaatagtatatttttataaatagagattattaatataatacagttgatcagtatttttcttagggttactggtttttctgtcctgtataagaaatacttttcaaccccaaaatccagggaagacatttccgttatcttttagaactgtatgactsgtactgtagctactagatccatgtggctattcagattaatggggagttgagtctgttctctctcccctaatgcaagaccctgttgcagtggtccctgtctccatggccctctttaaagtcagccttactaccttataaataagtaaataaataaatttaaattattaaaaataaattgtagaattaacttccttagttgcagtagccacattttaggtgttcagtgtgtgcctagtgctcaacatgactagtggcaaccatactggacaacacagatacagactatttccatcattgcagaaaagttctcttgggtcmtgttatcctaaaacttaattattgtaccttcacatttatatctcttattcatctgtaatcacttyacgagtggttttgggaaggggtcgagcttcattttatttcctatgaatagtcaacctaacaccatttagtgaaaagaccatcctttccccattgcccagcaaggcaacctttgtcatcatttaggcctgtttctgggccatctgttctgtttcattggcacattggtgtatcctcatgccagtacacagtctttatgactttgctttaaaacttggttatgatgtcctttagtgaattctgttagcatctgtgttgaaaatgtgtgattttggttttgtgtcctgtgtttgtaatgtatgtaaagtatgtgacatagctcattctaaatcctgctttgaaagtctttattgaatgcctgttatatgtgccaagtactgttataggtgctggggaataaagcacatctaaacttactgtagaaactttcatgcaaatagattgtatggttaggaagatgattctcatagtgatcataaaggcaagcaagaaaagagagggaggtgaaaatgctgtgcaggtaaagccagtatgaattgttgaaggatgtgtcacaattctgtatgactgtaggagaggtttttaaaacaaaaacattgtgtttgattttgatgcattctcatttgagtggctcagtgttgagtatgcggttatgtgtcttcttattcaggcttgctcactgtactttgtttgtgcagggaacaatgctatcatgatcattataatgtaaacatcccctcccaaagtgttaggaaaagtctgctgcagctccctgtggtctactgtcagttaccacttgtacccatctgttttatagcctcttcagttttgttactgctgctgtcatttctgccattactctttgtcctgtggacttgtttttaaaagttctgttatgatcactttaataaagtttcaggagagaggggaggctaatgcatgtgctcagcctggcatcttgagctttttagacagaattttctccttttgtgatacattaatttatttcctgttgcaaagagatggagcttcttgcagtccacgaaactgccrtatacctctatgattttgtttttggattctgtaagataccatgtttagtagacctgtgttgttgtccacgagtctacaggaagatgttcatgttttgtttcagaaaatatttctgttgttttgtgcttttcttaactcatcaaatacaatgtgtggctcgcccttggcccttcatattgcttaccttaattgtgtagaccataaccagtttctactttgactaaagtttgacgtacacaagttacttgaatgtggggattctgtctatccctctacgccctagtgtacatagtactatatattatagtctctttaagtgttaaatgaaaaaccagtctaaaatgcaggatttatattaaaaatcgagttgcctgcttaatggtattgtggtttccttgtagactataatgataaattttgtgagactgggtgagtcattttaggtaaaagatttgtggagctttaaagtgatactggagtatttatatatgttaatggaataggctgtctaattttgtgtatgggtatggtgatgagaccaaggctctgagtctgatttttaccccttgtgtatccccgatatgtggatcgttttgtgggacatgtattcttaacattggcagacttgccctctaataactgataactgctgtccaagggttcaaatacaaccatccatgaatgaacaacccagatcatcaggctgctggaaaaaacaacccaaaacatagactttcaagatgattcagtgaagtttccttttgatatggagaatagtaataggctgtttttattatcaagaagttctaaacatttcactgggtaactcacttttacttaaaatagttgactgtcaataatatctcattctattttttacttaaactttttccataggtggttctttgaactagactttcaaatttttttatgaaaatgtttttaatcgtgtgataataggtcaaaagatgaaattctgaacatgattataattctcacttttgctgagatattaatgctaaccagagtagttcaaaagtagtccctttatgagatagcttaaattacattttttcaaagtgatactaaatgaaattagtcatcagtgtgtgccaggttcataagatgagaaagcaaatttaaggcgagtaagcagttgttgatgggggtgcatggggccattgctgggtagtgctgaatatggacttgattggtagcaaagctgtctggaacagtggtcttggggtgggaggtaggggtcaaatggtatcccttcttttataagagctctttttttaagctttcagcagcgaaataaccaaaaggcgggcagcagaaaggaaaaggacaatacatcatattaaataacagatcggggagttgaccctaaagtgggcataggaagaaggtgtgcctcacctagctctttctgggcaagactttatcattatttttagatgaacttccttattatgggtgctcagttttttttcatcagtttttttcatagactataccatcaaatacataagagtaaattagcaatcaaattgatccatatttaacgtcattatttccctaatgaattgagcttatttattcagctttatttagccttttcccccgttaagttttctcatttaatccttgaaggcctttagaaatataaaaaacagaatgtaattgtataaagacacaactaatggggtattgagaatgtgcagggtcctttggaattgattacatatttgattattttgaaatatttttcaacaatggtccatatatttttgttttcattttagaacaaaatccagtctcatagcagaggagaatataatgtttacagcaccttccagagccatgaaccagagtttgactacttgaaaagtttagaaatagaagaaaagatcaayaaaattaggtggttaccccagaaaaatgctgctcagtttttattgtctaccaatggtaagtatacatattttctttccatgtgcccactgtgtgtacctgttgcacatatcctgtagcctaggagaggaatcatttaacagagatacttgtaaaaagsacttttgtttttctatacagaatgtaaactctacttttttactgtcacttgcagtttttagattctctgaaagattctctgatagcaattttttgtttactacacctccaatttgtagtgaaaagaatgggctgctataccattggatttaggtcaggtamtatttctgtcatttctcagtctcgtaatcttgggcaggttactaacactgaattgaattttcctcagcagcaaactagagatagcaattttttattatagtattattatgaatattaaataacttcacatacatcatgagtgcaagtgctcaataaatgttaatttrttcctcctttttaagtgtttgtaaactacacagagtatctcaaactgcagatacaaaatactcaaaggatggtctccattccaggatacgctataggagagcactttcttacttgatcaccattagcatattgccttcttcccagcaatccacatggctggaaggagattcctctcctactgtttacttgccaagggaacattttttgttgttttttgagacaatgtctgtcgcccaggctgaagtgcattggtgtaatcacagctcactgcagcctcgacctccctacctcagtctcctgagtagctgggaccacaggtgagtgccaccacacccggctaattttttaaaaacatttttgtagagactgggtctccctatgttgctcaggctggtcttgaattcctgggctcaagcagtctgccccgctcagtctcccaaagtgctgggattacacgtgtgagccactatgcctggcccaggaaaagttgagtgaggattaaaagttagtaatgacaggccgggcgtggtggctcacgcctgtaatcccagcactttaggaggctgaggcgggtggatcacgaggtcaggagattgagaccatcctggctaacatggtgaaaccgtgtctctactaaaaatacaaaaaaattatccgggtgtggtggcgggtgcctgtagttccagctactggggcgggggtgctgaggcaggagaatggggtgaacctgggaggcagagcttgcagtgagccgagatcgcgccattgcactccagcctgggcaacagagcgagactcgtctcaaaaaaaaaaaaaaaaagttagtaatgactctaccagaatttgaaatcctttatgatgagttgggtgctttctctttgttcttatgaaaaactttttcctgtgaattgtttggactttgttggggtcttgagtctaaagggaatcattagagtgactgaggagatactttagtttctgggtagccgtagtctataaaaatttgtgattaaaacttttttgaggttggtgctagggtgaggggaacctcttattttctcatcccctcactattaatttaaaaagcaaattctaacacctagaccataaacatttgcagaatatatacttaaatgacttyaggatgaaatgggggaagaaattcagcacttcctccatctaattgwtgcccctcgtccacagtattagttcttagaaatgctgttcacaaatgcctgatggccatcagcgttggccgcctcctgggtgcccgtttttctgatcatgaaagctttccccagccagtccattgagatgcgtaccctctgccttctctgttttcacaatagactgcattcccctctcttgtccttattagaagaaaaataaagagaagtaactatttaaagcctgtaaatcacagcactatgggtggagggaacagtttattcctgtcatatgctagcttctagtcttgggtcagttttaatttatatggtaaactaagttatttcaaatagcttcaaatattttagacactgttctttggcatcagatgatacataattaaaccatttatataatttctacttttagaagtaaatgttcctagggaaatgtgttgttaacattttatatattggaatatttttatgtcagtttatttcttatagggctacatcagctttcttataaagagaactttttaaatgtaggctgagttcaagagaatagtatagtgaagccctgcatgctcatcatccacttctgacactcctcagttcatggctaatttgtgtctcggatccttccccttcccctcctcctcagtgttatttcgaagcaaatccgattacaacgtctatggattaaatcttgtttaaagacattagagaatgcattgtagatttttgtcttttgtttcttaatactaagtaaaatacagctaactgggggctgcattttttaatgctaaaataagtgcttaataatagagtccaatgtggaaggataaagcagattatgagaatcatatgaactgttgtgtctgggtagatgggaaaaggatgggaggagtaggacttgaactatatctgaaaaactatttggaaagaaggagacttagagaaaaatgtcaacatctgttgattctgagtgatatcttttatattattttgtgtatttttctctgtgagttttttctgtgagcatagtaacaccccccccccccaatataatgggtctatataaaaactatatctgtgggagaatgatggaaaatagtaccaaactttccaggtttgattaaccaaaattaatcttataaaaatatttgcattggctttccatgatcattatatgaactgggtttcccagatcatttttacttaaaggacgtcatagtcaccttataacttgagttaatttaatgttccttcaagcattttaattctctttctctttaatcttcttttgctcctctgaattctcattaattcctctacattgcagaaaacatgaaactgacctgtcaaccatgagtgttacatatatgaataatgtaaagttcactcataaatagggtgtgtcttaacaacttcttgataagttttttagggtcttacataaagctgcattcccacaaaggaaacggcagcgtggttttccctgctcatacctctcataccttctgcttgtggtgagaggaactctgttcttctgcagtttctccaatgctttagttattagtgttgataattcaggggaacaccacagtgtggtcgttttggaaggaacagatcttgagaatctaataacgtctccactgaaaactgtgtttttacataatctcacatacagttttatggagtttgattattctcacatactttgtcttatgggccaaaaactccaggtaataaaatatcactgctgtagaacataaggattctgattttttaaaaatttatgtcatatttattaacatactgatttatttcctgcctgccttgtccccaccttactgaaaaatgtatcctaattcatatgtgtcctgtgtttgtgttaaggaaaaaacattttttaaagagctttcttcctgtaaacactattaggcaccacaaactaattttatctcatctgaaagtttcataaatacattgtggtttctttatttggatctttaataaggaggatggatttaaacaggccacaagacaactggmccagggggcgggggtgttgtcatcctcatcacaaatactttgcaagtatttagaacaaatacttctcagaatacagatttaggctaggctcatatctatctataaatcatatacatatataaactaaataacacatagaaaatctgtatgactgaactacaagaaaattataagcaaggtcacatagggcttagaagaaataatagattacagatgattaaagttagcagtttttctctgtttacacttcatcattgggaagggcatccttaggggcaactatcattcttctgtacgatacagagactgccaggctagagtcactggcatctctctgagttgtttctgtttttataaaatggctttatatactgttataaacaattttgttacaccattttgcttatgaaagatcgttaggaatgtatgcttttctataagaaaaactgttatacaattgtaacagttttaaatcaacatgcatgagcctatagtgatacaaataaacaattgaatggatacatggagagcagggatgcttcctgcaggagaattctaaataagacgtggatacatactcttccctacagggagtataacttatttctccctttaagtacaggctggatttagtgactcacttccaaagaacagaatatggcaagggtgaaagagtcattgtatagtggagaagcctggcaaacattgtcttaaccaaatgacccaagttaacgccaccagctgtaagtcatgttgataccatgtatccctttgaacaatgctgtgagaagtcacttcatctctctgttctgttcctaaaaacccatggtcccagtctgatcatgaggaaagagcaagcaaatccagttgagggatattctacaaagtacctcaccaccactactcaaaactgtcaagatcaagaaaaataaggagagcctgagaaacttaaaggcagagagactaaggaaacttgatgactaaatgcagtgttgtttgaattctggagcagaaaaggaatgttagtggaaaacctggttaaatctccaaatgcagtctgtagttaatagtaatatacaaagtcgacgtcttagttttgacacacgtaccatggttgcgtaagatgttgacagaagaaactgggtaaaggatatatggaacactgcaattcttgtaactttctgtaaatctaaacttaattgtaaaacaaaagtttgtttttaaacagatgccattttatatatccttgatacctaggaatttggtttcttcttgaaggacttggggatgtatgcttttaatcagttttcttcaggccctgtttcctacttgtgaaccctgatacaagaaggggaaaggttttaaaaaggaggcatccagtcctatggaggcctctgtggaatctttgataggctctgctaagaagtgggagcaagggagagcagctttactattttgattctacataataggcagtcttaatcaacttcattgttccctttaaattttttaaaattcagtactgaacatgtatatgtttacatgtagrtacagacatayatgtgtttgcatacaccacacatgcatatcaagtttttccctctagctttaattacttttaagggacagggatagagacctgtctgtgacttgatttgactatcacatggaatttatgagtgccaccaatctttgcactttatttccatgtgtgtatgttattcagctgataataggaaattttttagtaagttcagattagggtttttttttttttcgtggaatccttttacgtgaaatgtgaaatagcatattttaaatgccttaaaatgtttttcttcttcagtattttaaggacttttctttattttcttcccagataaaacaataaaattatggaaaatcagtgaaagggacaaaagaccagaagggtataacttgaaagaggaggatggaaggtatagagatcctactacagttactacactacgagtaagtacataagaaaaaaatgtcacagatagtgcttgtattcatattatatagcccaaatcctgagcagagcttgaataggaataattacagtctatctcccctttcccagtaattctgtaatcaggtaggacattgagtaactcatttaaacatagaaactgacctacatagaggtctcactttggccagggacagaagcaggactcaagcacaagacagtatttcacgccatcagacttcatctctggtttgtcatgttagctatcacaaggtcaagtttcaagataaattttctttggaaatcaaaaaagtagatacagatcaaatcttctagttgtagctaaaaaataccaagaattagatgttatgggttaattttctttttagcctctttaatctgaaccataaacatttattagcttggcatgtctttcaagcaaaatattgaaactaagaactgcaaattctaatagtattgcaaccagtaaaagaagatatattatccacattgttcattttttcttcagcactygaaaggatcaacatcagttgctttttaaaactaaatctatgtaatattgttctattttatgttctcaaaaactgaaataatgaagttttctgaatcttaattgctatttgaaactgagccttttgtaatttctgtttttcatgtgtcttattgacaggtgccagtctttaggcctatggatctaatggttgaggccagtccacgaagaatatttgccaatgctcatacatatcacatcaactcaatttctattaatagtgattatgaaacatatttatctgcagatgatttgcggattaatctttggcatctggaaattacagacaggagttttagtatccatttggttttctttggtgtttggtgaagaaggcatgttgtgcccatattagatttatttcatctctcctaatgaatttggttgctttttatagtctgtgtacatatatgtatggcaccttatttttttctttgtagatgagtaatgaaatactggaaaaagttatttgctaaacataaagggcataatgtattgatttaaaattggattcatggaattttaaggaatttgtctattgtatctatgtaaataggattattttttataatttaggtttttgttttaaaaatcacatttgtgaggtctgtgtatggtagcttatgcctgtaatcccagcggtttgggaggctgaggtgggaagatcacttgaggccaggagttcaaggtttacagtgagcttgattgtgcctctgcactccagcttggatgacagagcaacaccctgtctctaaaaaaattttttttcttctaatcaaatgtatgaactactgtatttgaattttttattgtaaaaatagtctcacctggctgcggtgactcagcctgtaatcccagcactttgggaggtcaaggtgggtggatcacctaaggtcagtagttcaaaaccagcctggccaacatagtgaaaccccgtctctcctaaaaatacaaaacattagccgggcatggtggcgcatgcctgtaatctaagctacatgggaggctgagttaggagaattgcttgaacctgggagatagaggttgcagtgagctgagattgtgccattgcactccagcctgggcaacaagagtgaaactctgtctcaaaaaatatatatatatagatttatatatattatattaattgatattaagattagattaagattagattaagattaatcttaagattagattaagattaattttaagattagaaaaagattaataattagattagattagaaaaagattagaaaaagaaagattaaagattacgattagattaagattagaaaaagaaattcacgcaagtcatgatgcatgattgggtaaataaaaatattctattgaggccgggcacagtgactcatgcctgtaatcccagcactttgggaggctgaggcgaggcggatggatcatgaggtcaggaggtcgagaccagcctggccaacatagtgaaaccccgtctctactaaaaatacaaaaaaaaaaaaaaattagtcagttgtagtggtgtgcgcctgtaatcccagcttttctggagactgatgcagtagaatcgcttgaacctgggagtcggaggctgcagtgagccgagattgcgccactgcactccagcctgggtgacagagtgaaactccgtctaaataaaaattaaaaaaaaaagttttaatccctttggaatttatactcataaaaacagtggagtgcaattcagaattaatatttttgcttaggtccatgaatgggttttaggtttgagaaatgtagaattatatttgcccttttttctaagtggaaattccttaataaaatgttatctagacattgtggatatcaagcctgccaatatggaagagctaacagaggtgattacagcagcagaatttcatccaaacagctgtaacacatttgtatacagcagcagtaaaggaactattcggctatgtgacatgagggcatctgccctctgtgatagacattctaaatgtaagtttattgtatctttccttaaaatgattacatattctgtttgtctgaaataagcctcagacatgataagtacaattacagaggttcaaagtcttaaacccgtgtgtccagagccacttgtacccttggtaatctgcctacctcctcatgaggcattccaggttattcctggaagctctcttggggggcatgtctattgattgccaaggaatatatctctcatggaatgctgttgttctttggtaacttgcggttgggctctgtaaccttgtattgaagtagagctgttcctttctttcccatcctcccttcctactttgagcttcctaggaagatttcttctgaggtttccttggcttaaaaaaaaaaaaaaaaaaacaactttggtttaaaaacttcaggatacaatattcttgtcttgttgaatattaactcatgaaaattgatacatgcctgttaccaaaataattttacctggctactagaaaataagatcctggtatgaatttgggatgggcgaggatggtgtgtttctcatggtgatgakacaggcagtcagtgaggcatattgcaggaataataccaataaacctggtgcactgaagtcagaagtcccaggtgagtctggttmtaaattagtcatatgactggaagtatactgcatacttatgcatcttcaacttcaatattcaattaaactaagaagctttcaggagaattctagccagagagatgtttttcagttctttattagcctggcattttacctcacttgtagggagtttgtgaatggttgtttaggaaatgctttgtccaagccagaatattgtacaccttgccctttttgtgttgttttgttttgtttttagtgtttgaagaacctgaagatcccagtaacaggtcatttttttccgaaatcatctcctctatttcggatgtaaaattcagccatagtggtcgatayatgatgactagagactatttgtcagtcaaaatttgggacttaaatatggaaaacaggcctgtggaaacataccaggtatttgagttttttctttcaatgagcatataccctgtttactttgaagtgtttatagagaaggattttgttactaggttttaatccctgtatggtgtttgttcaccattaggccttttccctcagagatctatgagtatgttgctcttccttatgttaaatgtatatatacttacataggttgtgttgtctcttgagttttgcagttaaagtgtgattttgctacccatttggttcagtattgacattgtttttttttctgccactatgtacatttaaagtgaggatggaagagcacccttcattgaggtctgggcaggaagaggattggagaaagtggccagtccttagtagaggtgcacctgctcaggttgtgggagtagttgaactagagattaaatttggtgtgccaagtcaaatggactggtgttctgccttttggcagataactgttgtcttcagctaaaagaaagggcttgaaagccttagcagatggctttaggagttgcctatccgttgttggatgtcagttcttgattctcttatcagccagccactactgtttatccgtgtccactacatcaaacagaagagaatgaagtacacagcctggaacagggtgagggacagcacaaacctgtgctaggccctagactgcagtgttgaaatcacttaactctaatttatacatatactttctttatgttatatattctcaatagactgggaagtatgtttctcaaactttaaatcctctgacaaacataaacgaagattgtttttgatacgtgaaatttcaaaataaatactgcactgaaacaaaagacaaaatactgctttgcttttcaaagtatagttcactattgagcaacatggatttgaactgcatgggttcactcatacacagattttttgttttgttttgttcaaccaatgcacatttgaaaatacaatatttgagggatgcaaacccctcaaatatatggagggccaaaacttcacgtgtgggttccgcagggctaactgcagatttgggtatacctggggttcttggaacccatccctcgtgtatactgaaaaaagacttctatttgtgtaactgccaagattgatatatctcctagttaccctcaccatcatttcattcccattgagaagaattgatttgaagcttagcttcatactgatgtatagtgagaaactctataatgtgcattctaaaatgttgctaaattatgataatctacctaattttacctgatttgctacttttctacttataaacagttggagtagtgattaaaagtagtcacattataggcaaatgtatcatatatagataaaactatttttattgaatttgtaccagcatcttgccaagttttgtgtgattgaagggtatttttttcttactgatttttttgtgttacatgctcacttttgatcctaaccccacatgagttgctattcctctgtattacagattttcacttaatgtcacagagacatggcctgaatcattccactatatttaaagttaaaatagacactgaaaataagtttagattgtttcatatagaatagagaattctaagcatttagaaggtaccttctcatttctgtcatttctccttaagtagctccttaaaaagagatggtgaaatatagacacttccttttttcctttgagttacaacaaatactttggaacttttgtttgtaattaatattaatgttgaaatatgtcatatttctcagactttttaaatatgagatttctagtttatccttttttgacatattagtaaatacagaattatataattcaaaaaacaggcacagctttgttagcttttgacattgtataatatgatactatcaaatttttaataatatatgcccagaataaccatataatttatcaccaaaccaaggcatggttaygctatgcatacatgtgcatttataatggaaaatataggcttcagttaaatttatgcccagaaaatggtatttaagaaagaaataggcacagtttcagtgttgttatcmgtagttaatggactgaaagccaagaatagtgatattcagatattgctataatgttcttttattagtctcttaactgtgccattttcaagtgtttttggcctgaatgttttattcaggcttataaaggctatgtgtgccatgcccagaatggagttttcctttgtcataccagtaggaaaatgtacctccctgaagggcttgtgtgttttgtaaaaggacaaaatgcctttattgttactgagaagattgagattaataggtttaaaaggtgtgtgtatgtgtctgtatatgccctttttttctttttaaagatatggacttgttaaatcattttcctaatttcagtgcagtatatttgtatttttcccccaggtgcatgaatacctcagaagtaaactytgttcactgtatgaaaatgactgcatatttgacaaatttgaatgttgttggaatggatctgacaggtaattaagtcaaacctctcaaatatgaattttattaaagaaaagaaacaactatttcattccaggtcctaacttcgtctctagggattccttgaaataaatttagtaattttagatatagcacagcagtactggtagataaaaaattaaagcattgtatttcactagtaaatataaaagtacacaaattctaggtaatctaaattatttaaatgtctagaattttttttcttttatgaaccagatcacatttctgacatgctaaccattaaaacggtgaagcttcagcttggttgttattcttccattaaactgttgcagaaacattcaggcggcagataactcatttggattgttagaaacaccaggttttccagatgctacattaacacctcatagaagtggtctttcatatgtatgttatgtatgatgttaaccataatatatatggttaaaattttagtagtagttatcctttgctttttataatttccagttttgccgtagtgtaattcctttttcgtattcatttttagtaaaatgttacccattatttaaagataaaataagtcttactttgagtcttttagttgtctatttgccactatgttccagtagaacagaaagtagtaaaacataattttggaattaaactgacatttaaagtaatsagagatacttcaacaacagttttatcacagagcttaatatgattccgatttcatggtgttgtgtgttacagaggataatagaacttatagaatgttttctttcatctggcttttaaaattatctgatttttgacataaggactagtaaacctagagttctgttaatagcaaacattgcctttgagtgctactactaaacctgaggcatcaagaagaaagaaggaaagggaagaagaaaaaaaagattaacaaatttgaagagtaaagagatactgaaataaggtgtggcgcacagctacaaccagtttttcattgtatttaagcagataattagcagttttatgttctattatcagaaaaaaackatttgttttccttaatattaaaaatttttttttaactatttcaaacttagagaaaatttgttagaataacacaaagaactcttggctggccttgacccaggttcccctgtcgctgtttgctgtatcacgtgttctattctctgtttatttatagctatatttgtccacataggtacgtgcgcatgtgctcacatgcaacttgtgtgccacatgggaatttattccatttacgccagatgtgatgcccataaccctaaattcttgaatgagtatttcctgacaaaaacactttccaacatagtgacagtgcagcatccaaagcaacattcacagcgatgcagtactgccatctaatccggagacccactgaaactgaccagttactgtaactatgtcctttatggcacagaacaaagtcagtctggttcagtatccagcatttagttgtcatctcttgttagtctcctttattctgaaacagttcctcagtctctccttgtctttcatgaccttggcattttgaagaacacaggccagttattttatagaatgtttcctcatgattagattcaggctatacatttttggcaggaataccacagaaatgctggcctaatgatacctttttaaagtttcaagtagccacagcctagrtgtcctaatacattaaaaccacgcaaactcagatgatatggggatgtcaatctaaattacacaagccatttttaaagaaatacagttttgtcatcttcaggggcacgcattaccttgagtttgattaaagttgttgccaagtgtcctttgggaattgacattactaaatagataataatttgtactcagtaggtgacctttgtatgtaagtattactttgaacaattccccagtatcctgtaatccttatttacaataataatttgaaccattggtaagcagcggtagcagaccctttccaaattaagagcttcaaacttacgaagttttgtttgtgaggatacttaataaatgtcgagcagtaatgggtggcaaatagaactgacaaggaagtgtcttgggcagtttaaaaattttgccacccctttaaactgatacttwtataaatatttgcttaaaatgttctaagtggtaaaagtaaaatgatgttctgttaagaaaatattacagcctgggcaacatagcaagaccctgtctctacaaaatatttaaaaattatctggacatggcagcatatgcctgtagtcacagctactcaggagactgaagtgcaaggactgcttgaacccaggaggttgaggttgtggttgcagtgagctgtgattgtgccaccacatttcaacccgggtgacagagtgaaaccctgtcttgaaaaatacatatatataggccgggcacggtggctcacgcctgtaatcccagcactttgggaggccaaggcmggcggatcatgaggtcaggagattgagaccatcctggctaacgtggtgaaaccctgtctctactgaaaatacaaaaaaaactagccgggcgtggtggcggacgcctgtagtcccagctactcaggaggctgaggcagaagaatggcatgaacccaggaggcagagcttgcagtgagccgagatcgcaccactgcactccagcctgggcaacagagcgagactccgtctcaaaaaaaaaaaaattatacacacacacacacacacattatgtaccacttaatattctcaggagcagattataacataagcatttattaaatgtgattatctgaaccagacaataccctgagaagattatttatttatgagacagagtctcactctgtcacccaggctggagtgcagtggcacaatcttggctcagtgcaacctccgcctcccgggttcaagggattctcctgcctcagcctcctgagtagctgggactacaggcacgtgccactacacccagctaatttttttttttttccgagacggagtcttgctcagttgcccaggctggagtgcagtggcrcgaccttggctcactgcaagctccacctcccgggttcacaccattctcctgcctcagcctcccgagtagttgggactacgggtgcctgccaccacgccaggctaattttttttgtatttttagtagagaccgggtttcaccatgttagccagaatggtctcgatctcctgacgtcgtgatctgcccaccttggcctcccaaagtgctgggattacaggcgtgagccactgcgcccggcccaaaaaatgtaaatcataagataaagcattggtttcttgtgaacagctacagctacttcatgcggggttcttttgttttagaacctgtgagttccacagatagttgctcctttgagaagctggctggcctggttgatcacatagcctgtagttgcaaaaatacttaacaacgataattctgcactcctaagaagttttacttgaggatgctgtcaactttgctgatagttttggtagccataaaaagaataagcagaaaacccagttaattagtacygtatttctggtttattctagtgattgagttgatgtcaacagcccctgtcccttagtttaaatctgcttttgaagtagcttcctatggtttaattgccgaatcattttacttgaamacaatttcttgttctgcttgtttgactgagtgtactgtctrttttcacagtgttgtcatgactggatcttacaataatttcttcagaatgtttgacagaaacacaaagcgagacataaccctagaagcatcgcgggaaaacaataagcctcgcacagttctgaagcctcgcaaagtctgtgcaagtggcaagcgaaagaaagatgaaataagtgttgacagcctagacttcaataagaaaatccttcacacagcctggcaccccaaggaaaatatcattgccgtagctactacaaacaatctgtatatatttcaagacaaagtgaattagggttggcattcctagcagaagaacccacttcctgcttagttgagatagttgaatctagcattcgttcctataaaagagagaggtccattgtggcgcccctttccagtgtttgacagtgtgccattcgacaacacattgttatagctacatggagaaagctctgtggattcatcactgtggtgttctccatgtctgctagccatttaggtaagggtagggcacttttaatttaaatgacttcttgcaccatcttgcctaatggactagattggactgtatcaacattgatwtactccactttttatgccttccattgtgatgacgtcaaacacagtgaaagccttcagtcatgctatgggatttaattgtgtatcctcattactgtatcatttgtggggtacaccccttccccctttttttaaattaaatacagctcattcttactgtggcttgtagcattcctcctcttctggcctcctggactgctccccttcatctcttacccttgccccctccacccggtcttggtggtggtatattamaaaaagaaagaatgaaagcacacaaaatgagtcagtttggggtcagtggtataaagggggtatatgttgcaaacaaatgttttagtaacagttggctgtaatcactcctcgccgtgtctggcactgaaaataaggaaaaaaaacctactactgaataaaagtgacaaagaatggagaatctggttttctttttctttttaacctacctcttgtagccaatattttgtgtcatacctttgggcacagtgaaacaaaatgggttttcattgtttattggtatttttgttaattatttttaacaagtgttcttttacatgcaggaggagaggtattggttctctatgaacatattttgaatataggttttattaaggatttcacaatctataaatgctactagtttttttttttttttttaccatcatgagggtattggatacattgtgtctctatttaactcattatgtgttaatgaaattgttgtaaatgggaaccaaatttgtagaacttaatttctactttttagagtgcttaatttcatttttgccttactaaatagtcaaagacttataaaacatttttaacaagttagaacttttttgttattcagtcatataaaatagcagaaaactaacatcaagtgacactgcactaaatactttttttgtattttactgctatcaaatcagaatgaaatatactttaccatagatatttttcttctatttttggttttccaaagctatatgaaagacaaatttttaaaggtacagcgttcaaaaagtgcttaatgaactccaacagctgcctcaaataaaaatctgtatatgaatacattttccctaagcggtgatacattatccaaagatgaagagtgctcctatttttaataggtagaatgtacctttgtcagtcttgcagaaactttaatggagaagaaatggactttatttttgaaaggtgaaatgaacaggcatttatattattagagaatggtagtcttattttggtggaacataatgtaacaaccttgaatttcagaggactctgagtgcttctatgtccactacctattgttctattcttcaataatgaaaaagaattcaacgagccgaccgtgattccctctactacaaatattatgtcttgtaagttagcatttttagcacacaggagaaattttatgtaataaaattactgtatcttttggatttaacaaatktgtatttgaaacacattctatgtctgataattcttaatggcacttttactaatttatttggggatcttgggtacattcttaatttgtgtttattcttcacgcttgacttgcaagtgggatattcccctgccacaagtgtcaaacagtgatattcttcctgtgttgtgactggacagttttccagatcttttttgggagattttcctacagcttggttgtatgtcttgagataacaccaccaaacagctctcagaaattcttttttgattgatcagtagctatgatgattctcctccatgacactaaggattagtttatatatttaagagaaataattgctaaaattaaaatgcctctatcaaggaatgctattataaattattgttaacattctcaagtattaattttttaatttcattggtgtagcaaactctaagcccagccactcattttacatggccatggttaatctttttattaataaaaattatacttagaataaacttagtcttgtcaagttgcttgtatttcctattctcttgccactaatatacatgcacatactccatcacttaaccttttagaagagattgtgggtaggaaaaggactttcattctattaacctcttttgatctttacttagtggctgggcaataagaattgttttataaacctgtctaaatacatgtttatgtaaccattaactgctggatggtaagcttctgtgcagccctccgtctcttgggattaaaaaaaatgcatccagtcgggcgcggtggctcactcttgtaatcccaacactttgggaggccgaggtgggtgaatcacctgaggtcaggagttcgagaccagcctggccaacatggtgaaacgccgtctctactaaaaatacaaaaatcagccaggtgtggtggcacgtgtctaatcgcagctattccaaaagatgaggcaggagaattggcttgaatccgggaggcagaggttgcagtgagccgagatcgcgccactgcactccagcctgggtgacagagcgagacgccgactcaaacaaaaatgcgtccatgcactcttttcctttcaaaatgaagagaattttttaaaccttaaatgtgagttattctggttagggatacttctacggaaagctagagataggaaagcaggttctttcagtgtgtgacttttgagtaaggtgttaattaggaaattgtgcacatgtgaaagctatgcagtactgataaagaatttttagtgatatttaaacccttctaagggaatattgtttgagcatctttaccacacataaattcaaatgtagatagtattgtgcccttccagaaaaacaaaaccaatcccccccaaaagatggaaaagataggcatatgctgggtagtcaagaatcaagtcagtttacttgtgtatttgagagcacctgtactttagtatcttacttatctatctgttcagatggtgatagtttaagctctgcgtgtatgtcttactgtggttaaaaagggagttttatgcacctcctcttccccctcaaaaagccttgaaaaatgaccctgcttcattttgtaattatgcatgaagtcaaaacattacaactcttttagtattaatcaaatgcttagcgattctacagagtcttgaggtgttctcagatgccaaatatattttgtaactgagtttgcctcaacattttattccgtagtggtgtcagactggaacctcttacctctgtattagaatgaagaaacacccactttacaggcttaacgttaataagtctcttgctagctcagtgtatcaaagagaaggcactacagagcttagtttcctctaaaaggaatttggcaaactggtataaggggaaaaactaatatttgtgttttttcacatgttctactcatgctcctttgtaatctgaatagcaacaagttcttcgaggactttcccgctagagggcaatggtggggagcggtggctcatgcctgtaatcccagcactttgggaggctgaggtgggaggatcacttgagatcagcctgggcaacaaaccaagatcccatctctacaaataaaagatgtattttaagaaatatattttaggaaaccactagggggcgatcgttaagttttgaacagcaatgatggggtatttttgagaaagtataaacgggagtctttatgtactggaagagcttcattattaaagtcagggaccaaatacaggatattgtgtacccaaaaccactgttccctatgacccttgagtaaatatttgagaacccactgatggaggggaacacaaaagccaactgtgatgtcattacttatattgtactacaatcaagtcatgcaatataagtacaacaaagtagtacaattactcaacaaaatacttgcaaaatacaaaactttagctgggtttacccaaatgccaactgtgatgtcattacttacattgtactactttattgtacttacactgtatgacttcattgtagtacaatataagtaatgacatcacagttggcatttgtgtacatccagctaagttctgtattttgcaagtattttgttgagtagtttgcattgatgttcatgaaggatattgatctacaatttttttatattttaatgtcactgtctagtgtaatgctgatctcataaaatgaattttcctctcctgtattattgaagaatatggacaaaattggtacaatttcttccttcagtgtttggtagaattcactagtgacaaattattaaataccattctatcaaaggtcacatcactgagtcactgtaaggagaacaacatttgtctcttttcagaattgaaatgtatttctgctctattcaccaaatcgcccagccgagttaacagaatgaagcatcataatttgagtttgtcaaacaccattttgctctcttacagtatctttgaaaatgttaatttgttagcccaaatctatatcaaacttttgttgcccaacacttaacttaccaatgcctaaaaagattcactgatcaggtaatgtagttgttaagtaacacagagcaaagtggttaggacgtgctggactgccacactaggaatcctgtgagtttaagaaaatataataatgataattgctttttgagacacagtctcgctctgtcacccaggctgtaatgcagtggcctgatcatggctcactgcagcctcaacctcttgggcccactcctctcatctcagcctcccaagtagctgggactacaggcacctgctaccatgcccagctaactttttaaaagtttttgtagagatgttgcccaagctaagcttcaattcctgggctcaagtgatcctcccgcgtccacctcccaaaatgttgggattagaggcatgagccaccactgtgcctagcctagaaaatagaaacttctccctcctcctctccccttcttccctcttctcatccttacttctttctgtccactggcagccaagtcctgacctatttgcagacaagtttatttggtcattggatgacaatgcctctaacagtcactcctgaactacactttctaactccccttccttctgtaagcatttgagtttgtaccttctcttttgctttaaaattacaaccaaaccaggcaaaatacttgtaattggatatggtattatggaatcaatgctcaaaaattaattaatagtaaaacatcttgcagagcacagcatcgtttctgtttttcttttttctttttatttatttactttatttttgagacagtcttactccatcacccagactggagggcagtagggcagtggtgcaatcacagttcactgctaccttaaaccccaagctcaggtgatcctcccacctcagcctcccaggtagctgggactacagatgtgcaccaccacacccttttgtatttttcgtagagatggggtttcaccatgttgcccaggctggtctcgaacgccactgcactccagcctgggcgacagaacgagactctgtctctaaataaataaagtaattggtagggcaagtatattaccttatttcttatgaaaattaatcatcttaataaatcaggtaatagtatttgtatccagtagctattgccacaatcaagtaatagaagtacaactatagctaaaatgagaaaagtaaatattaagtggggatatcagctgggcgtggtggctcatgtctgtaagcccaacactaggggaggccaaggtaggtggatcacgtgaggtcaggagttaagaccagcctggccaacatggtgagaccccatctttattactaaaaatacaaaaaagctgggcatggtggtacatacctgtaatcccagctactcaggaggctgaggcacaagaatcgcttgaacccaggaggtggaggttgcagtgagctgggatcctgccactgaactccagcctgcgtgacagagtgagaacctatccaaaaaaaaaaaaaaaggatatgatcaactaaaaaatgggtagtagagataaaggtggaagaagaggaattatactaatttcattactgttccttgctggacattaaaagaaactaaggaaaagaaggattaggaggattatataaatatatagttataaaggtaactaactgaacaaaaattaaaatttcatcaggctaatacaactaagcaacaataataatagtaaaaacccaaaccatgatcttaatattgaggttgaactgaagacaaaattatgaccactttatagtgacaaacagggatagttatgaatatctgtgcatcaactataaggaatgaagatacaagaagaaagaaacaggagtaggagatattaatttacctcttgaaatccatgacatgtaaaggggggaaataatcaactatatgaaaacttaaatgacattaaggtggttccaacagatacatcaaacctgattttgtgaacacaaactacatcttcttttcaaatacggaatagtccccaaaaggcatcataagttaggccccagagaacacctaaaaaaaaaaaaaaaaaatcccacactagaaatgatacaaaaaccaaatctgaccagggaaaaattcttaaatacccaaattaataaaga

SEQ ID NO: 93650 - DNA, 232641 bp, Homo sapiens
  misc_feature (1)...(232641): n = A,T,C or G
agatgtacatgaacaaaaggaacgatggagaataattgccctctggtaataccaagtggcagaaactatgccacttcagtctattgtcctgtataaaaataggctgatggcttcatatcacctgattttccaaagagggcatgtattagttttcttttgctgctgtaacaaattatcacaaacatagtagcttaacacaaatatattttacagttctgcagtcataaatctggcattggtaccattgggctaaaatcaaggtgttagcaggattgagttattttctgggggctctagggaagaatctgtttcctttttttttgcaacttccagagactgctcacattccttggcttgtggattcttccatcaccttcaaagccagcactgactggttgagtcttcacatggtattactttcaacctccttctgtgtctcccttttgtacctataaggatgctgatgattacattaggcccactcacataatccaggaaagtctccctgttctaaagtctgttgattagcaagcttaaattccatcttcgatgttcattccactttgccacataaagtaacatatctgcagcttccagagatttggacttgagtatctttgaggtgccattattctgcccaccttaaatgtggatataaaaatacattgtagattgctgtattatctgtagtctttgatttttttaggttttctgttttttctctcatgatgttggccctctctcatgtgtggtgattcaaggttgtaaattcatcttctgtgggatgttccttctgcaaacatcctggaccacactgacttcaggaattatggctgtgttggtttctcttgaggtggtcttggcagctgtggtggttttccacacaacagagatggtttctcagcactgcagggaggaatacgtttgagagaaacctgcctacctcaggctgaggtgccttcctttgtagagtttctatctctcctaaatcctgaccacagccagaagggactatttgcatttcccttaatataagagtcccttttcatttccaagcttattagaccttcctttaagacactgtaaagcaaaagcagcagcatgcatgggaagccaaataacaacaatattgagtaaaaggagacctgcttgttgttgggcagacaagactagtgtctcttaggtgacctttatacaaagtatatcccatccctgttcttgataacaataaaagctgacacttacattccatttatcacatgccagaaactgtttattgcacttggcatatattaacttactaatttctcagaacaactattaatgtctctacttcgtgtctctactttgcaggtgagtttacaaagaggttgtgttagtttgttctcacactgctacacggacataccagagactgggtaatgtataaaggaaagaggtttaattgactcaccgttccacagggctggggaggcctcaggaaacctacaatgatggcagaaggggaagcaaacttgtccttcttcacatggtggcagcaaggagaaatgcagagcaaaatggggaaacgccccttataaaaccatcagatctcatgagaacgcactcattatcatgagaacagcatgagggtaaccatccccatgactaaattaccttctacgaggtccctcccatgacatgtggggactggggaactataattcaagatgagatttgagtggggacacagccaaaccataccagaggttaaatgacttatcctggattgtacagtattttattctgagcaactcagcatcaaaagacctaggttcaggatatggaggaataggtaataccaagagaagttacacacatacaccacttaaacagctttcattcatttccttctttcaacaagccaagtaacaacagcaagcaagtaaaaggagatagtgggtggaaggcacataccacatgtttggggattgattaatgcctctcactgcctgggctgccactcattctcagccggtatttctgatggtctctgctggcagatgtctttgccccaatctttgccattggttggagtcacctcacggtcagtatgtggtagtcacgacccctcaagcagtggcgggaatccacattcatcatggcttggtgggttgtccccatgttctgattggggagggtgagtcctctgggtgccttgcagtctcttggtttgcagttgcatcagctctattctggttagctatatccatctgcataagccattacatcattatatatgcgttgttggctagttatacccttccatatccatgcatttcaggactttctgagccttttctaaacatggttatgactttgggggagggcaggtgtttatctcttttgagtgatatagtcatatgcaaatccgtaatggggtatacatgtatgattttaattacttttggaaaaaaagcttacaaggaaaggaacatttttggtgggaaaacttgtttatcttctttttttaaagcacagcaaatagatttttatttattcctgttaaaatgtatgatgtaatatcctttaatcatatgaagctagttagtgacaaagctaggattcatatccaagcagtctgtatgtggaatccacacctttaaccacctctctgcccggaactaactctctgcctggaactaacacttcaaattaaaccgactacccatgagcgtacagaccatagccagaaaaaatccaagttatctcagtgcaggctacagatgtctttggagcagcagccagaagaccctggtatgtaagagctatcttataaagctactaaaactttaatgggagagttgctaagaaactgatacagaggatatctttaaattactgtaattttgctgtcttgtaataagttgttttacctgtttttttttggtaaagctttttctgatacaatgttgttagtacgattgcagctgttggcatcattgcccatctgtggttttgtaaaaaaatattcacctgggtttctggatggaacttcaactaagagaacgcaacacttttatagagaaatctgggcccttggcaccatagacatttctgacataaaaataacttattatgtttcggtaagaccaaaaatgaggaaatgacatgcctcagccaaaccacagctctggcttgtgctcgtggatttgcggaggaggcattgcagaggggatcgaagaataactagacttagtagaaatactaccagaataccaaatacggtgggagatcaatgggaagtatatggatggaatgacacaccaattctagttgaaatatggaacttgtgcaagttcatgattgtgtaattttcagagtgtccatgcgaaccccatagggtaagaaagcaaacatcagaacacagcccaaaagatcggtgtcctttgagttggtggcttttcttttgtgtcaacagtatagcctaagagagtgctatgtgctcccatttttgtagtacttgggtatactttgtgtgtgtctgtgtgtgtgtgtgtgtgtgtgtgtgtgtgtgtagacagggtctcactttgttgcccaggctgatctttgatcttgattttttgggatcaagcattctcctgcctcagcttcccaaaatgctgggattataagtgtgagccactgtactcggccaggatattgtttttgtgaaaacgcttatgaaaataagatactacacacctgtgatcaacaatagtttagagacagagtttataaagaatcctgaattatcagataaggaaagaattaaacctaatgtttctttgctttagattcccattctgtgtaaaacgatggatatttattcccagcccctatctttgtcacaaaggaagttgcgaggggaaagctatcaatagtggctgtgagttcatgttaacactttatgcatgccatgtaagagaacggatctaacattcaaagagtgcttaaaaaacacctaggcttttaatcctcatgacagtgctaaactaaggtcaacattttaggctgagagagctgaagcatacctatcaagattagccaactagtaatcatcagagatgtgactttcaagcccaggtttgtttgaccccaagctttgctctttccactatgatatagtgcattcctcctggaattgtgtttagccacagaagattaggtaatagcatgtgtcctttcatgtttggagctcaacattagtcggtataaacccaaacttcataaatacttaatgttaagtacttttcctactttctgctcgaggggaagaaagcaatttccagttgattgaatgcatttccagacatggttttccagtccagtttcaggcaatttagttttttgttttttgtttgtttgtttgttttgctgagacaatgttgctctgccacccaggctggagtgcagtggcacgatttcggctcactgcaacctctgcctcctgggttcaagccatcctcctgcctcagcctccgcagtagctgggattacaggcgcgcaccaccacgcccaactaatttttgtatttttagtagagatggggtttcctcatgttggccaggctggtctggaactcctgacctcgtgatctgcccaccttggcctcccaaagtgctgggattacaggtgtgagctactgggcctggccggcaatttagtttttaaaaatctctgtccagcagagacttccttattttattgttattattattttttgtactgatagacacaacagatgcattttgaataagtctgaacatcactactttctatgagtaactgaccactgggagaccagatgagatatttcttatgcctcccattccaggaggccattatttaggggacacatggtgtgttatggatatctaacatatcacgttggatcactcccacttctcaatggttctctgctctacatcaagaagttaagattaaaaaacagaagcatgaagaagaatgttgtggactgattttagttgcactgatgtgagttttcctatccagctacactttttgtccggtgtctactgcgaacaatggcacatttcatcacacagctggataatgttaagaattataatctgtaaccccagattagatgaaaataaatgccactcrtaatactaattatgttcctgaccttattgtatttacttactaaccccaaataaactcatctatttacttaaatgggaatattaacatcacataaatcatatttaacaatgaacacatgaaacaatttatcacctagtttaatattctgcttgactcatctaaatcttgtttctcttacagaatttccatctatgtccactctattggaataatgctgtttctgtatacttctacaatgcctsctttactattgaacagtaggtatgaaatggagtcctcaatgggattatctcattcatggatacatcttttgatagtagaaaaacaaaagtatacataggttgagggaaagacagaaaaagcagttgctgaaaaatagcacctgatggtgagtaatggacagcaatcaggtttttgttatgttttcttgttgtttttgtgacagggtctccgccctctgtcacccaggctggagtgcagtggtgtgacctcggctcacagcaacctctgcctcccgggctcaagtgatcctcccaacagactcctgagtagctgggactacacgcatgtgccactttgcccagctaatctgtgtattttttgtagagatggagcttcgccgtgatggccaggctgatcttgaactcccgggctcaagtggcccgccggcctcggcctcccaaagtgctaggattacaggcatgagccaccgtgaccagcctagcaatcaggtttttatctgtttcgggtgtgggagaggctaagctaagccagaattcaaaagaaaggaatatattcataattagttacacttagggtgaaaaataaaatttcagagagagcagaataggaaaaaaaatcataattttaataattcacacttattgcactattgttatttcaattttacagagaaaaacaggcatagagtgatgaaatagcaagtacatatataaacaacaaatggcagagctggaacgccaatcctagcaatctgaaccagcatttaaaaacgaggaattaaagcacatagggtgagaaaaattayagggaagggacaagagctcaaggggacacctggaaaagaaatactataatttaaaaaattaccaacgggctaattatacttgtgttttactggcagagcgctttgtctgttagctcttttaatcccgctaataattctgtgaggttggtactataagttccatttttcagacaaggacgcttaatagatgataacggacacattccctgcttgctctgatctgcatctcaacagctggctctggagcaagcaaagggagactaagggaaacagagcggagcagggcaaagaaagccgactgaaagtgagaaatgcaggaaatgtttcccatctaggcagaagctggttccagcattcaaatctctccagccggcccgccaccacgtcacaaagcccgcctctcagtgacaaagccccgccccgttcccttggctgttctctgagctcccaatacttccctccttctctttggcccctgctaccccgcctagcatcatttcctgtgcgctggatgctgattggtccgacagtcggaagtgagggcgggcggtgggggccgttgccgcagtgacagtgctaggggagtccgaagatggcggcgtcgcgtcgctctcagcatcatcaccaccatcatcaacaacagctccagcccgccccaggggcttcagcgccgccgccgccacctcctcccccactcagccctggcctggccccggggaccaccccagcctctcccacggccagcggcctggcccccttcgcctccccgcggcacggcctagcgctgccggagggggatggcagtcgggatccgcccgacaggccccgatccccggacccggttgacggtaccagctgttgcagtaccaccagcacaatctgtaccgtcgccgccgctcccgtggtcccagcggtttctacttcatctgccgctggggtcgctcccaacccagccggcagtggcagtaacaattcaccgtcgtcctcttcttccccgacttcttcctcatcttcctcyccatcctcccctggatcragcttggcggagagccccgaggcggccggagttagcagcacagcaccactggggcctggggcagcaggacctgggacaggggtcccagcagtgagcggggccctacgggaactgctggaggcctgtcgcaatggggacgtgtcccgggtaaagagrctggtggacgcggcaaacgtaaatgcaaaggacatggccggccggaagtcttctcccctgcacttcgctgcaggtcagagacttttgaattgtttattaagggttatggstttgggtgcagggtccggttaggacaagaaaacaggttattgtgatgggacaaagtgggggcgtggttatggttcttcatcacctcaccagaagactggaggttcctttcttttggtggtgcctgggtgatgggggcgtggttgggggggataagtgaatccaaggaattcttcagtggttgcacagtactcattacaaaactcactgtagttggtagtctctgcatatggatatatttacactttagtttttggtgtgcaggaatacagttagatttggacagctttagagtagttttgtcgtttgtgtgctagtttattttgtttttacaagggtatgtcstttgaggacagtccagaccaaaagaggtttaatacaacccaacacatgtttgaggatctattgtagccttaataacccaatgaaagacataaatgaagtgtttgaaagtttcccttcttctaaagaagtttgcagtctaaacggggagaccaaaatatgccaatgtgaaacaactggagaagaatatttggatgcattatatgatgatggaagaaatataggctttgatgttgtggccactattatttgttgtctagcagaccatttacctcgtgtcagttgcctcagttttctcatgggcaaaaatcataaaatgatgttgtgcgagcatttggtgagaagtatctggcacaaagttctccctcaaaaagtgtgaatttcttaagctctggaccccacacttgtctttttttttttttttgcaagtagttgatgattttctctcaaagacacctaataatatgtttataaaataaagagaactgtaaaataaaaacaaaggaccataatctcactgcctggatacctattgttgatattttaaaaatgtaggtaataatgttttatacattagaaacattatattggaaatacatatattgtacgttatacaattcaaataggacagaaaaatacaaaatgaaaggcatcacacagaaacatcaaagataacacaccagagataacttctgttaagtttctcctatatttctaatatatatatatatcacttcttcagtttgttctgttaacagtaaaacatgtgttgacccactgtagtatttatttttaccacacttgggagatatgattaaccattttacagatgacaaaagtgaagcatatatcgatcgcttaaataagtccaaattcagtcaggaaatagtggaaattgagtttgaattcaggcagtttgattttagagcttgtgaaatcaaacttaaactgtcagaaccctggattaaggtcacttttcatttttgtgagtaattgaagtgtagagttcccaatttttgggagaagtagtaatgcggaggggcttatatgcaagagagtagctttcacatgttttttattgtagcccatacttagaaatacattttacattgtcacatacgcaactgaatcaaaagtttctggaaacaatactttcccttaatacatgtgttgtcctctgatattttatattttattctgtttcatttttagcaaatgctgcttgtgatccattaatgggtcgtgaccagtggtatgagaaacacttaaaggaaatcattgttaggtcactggattcattattgatatacagacactacttattaggaatgcagtgaattgaatcagaaacagacttttgcctatttgtttgctcaagggtcttgcttgttttagatgaaatagcatttctttttccttaggctaaatgaaaggcctaagtctgattttattaatcaacagaggtgtctacttttgcatactttattccaagtttgcctattttaacaaattgcgtcacaaatcatgtcatttctcaccatcccactttatgcgtaatcaccaataaatgatagttatatttatgtgtattaatgtatttaggataagtcacacaaaatagtgcttgtttctcaaatcacgtgtcttctatttgccacaatagttacttgttattctgtttcagagttttatgtatatccagataagctagaagataaacaatcaaacagtaccgtaattatgttgtagttatgacaagctaaccttgaattggctttttaagaaagtttttagctcagttgtggaaaacacagtaataaaattctcgatatgaaaacataatgtcctgtagtcagtttgccacgcttccgtgattgaattcgtaacattaaagttttattaaactttagtcttctttatcatgtataggctgagaaatgaaaaaaattatcagttgactggttattatgatagtaattgaattgtcacggaatagctgttttaaagatgagaaattggtacaatcccttggatggaaaaatttaaaaactgcagtttatttgttccagaaatattttagtgtgcttagatgatcgggtgttaaatactgacacaattgtgtaatggcaagcagcccttaacccttatggagcttacagtctagtggggaagcataaacaacaacaacaacaaaaacctataaagtatctagtgtctaatctagagtgataggaaacgtatattatactgtctgtcccaatatgtaataggagctcttatcyttgttttagagcagttaaggaagtctttgtaggtagatttttttaaagcaggaattaaaagggtgagcccaagctagccaagcaaaggttggaagggacgatgttaactaatgcttttatttatttttaaaaatgagtttacagttctatagaatgaaatgaaacaatttttttttctttccaacttttaggttcagggattacatgtgcaggtttgttacatgggtaaattgtgaatcttgggggctttagtgtacagattatttcatcacctaggcaatgagcatagtagcagataggtagttttttgattttcagcctcccccatccctaccctccacccttaagtaagccccagtgtgtattcttcccttgtctgtgtccatgtgtactcaaggtttagctcccacttacttaagtgagaacatgtggtatttggaaatcatttttaaagatctcagatgtggtatgaaaccatatttaaatccttatcactttatttatattaccttaagaataatcatattctttccagcagtaaaattaagaatcctttgtatcctatcttggattgtgataatttgtttagaatatggtttagagactktgttaataatggaatcatcctatctgcagttaagacaaaatcttgtttccattgttgatacaggttctcaaaatactatttttgatgcctttgtaagatggctttgtaaagatgagccattcttttattgttgactagaatttatatgagactttttcttctacagatgtggtccttgaccctggttttctattrtttaaagtatagcagtcaaaatagttttataaatagtaccaatttagagtgatacctccttaggatggtttctagtagtgacatatttttgttaaaggacccatatattctgaagacgtctctttttatagaaaagtttaaatgaggtcttttttttattaaggccttagtaaaacattaaattctgagattttatagtatttacatgaaattgaagaaatcttgaaatgggcttcctgttagttaacatatacgacttggattatgataggtaatgtgaggtattttaaaataaaaactagttttctttgttgggttttgtttttaatggtatctactacaatacatatttaacagtacagagatttttcaactcattcctgactcttctctagatttttcagcatggccatacttgtctttttttttttttttttttcatttctcgcctttgtacaaatgtcgttcctgttaataatagaagtcaccatatactctagattgttgcctatcagtgggtaataaaatgagtcagaatgctgcagtcttggagtgggaattatcttacacttctcgttgcctggcaagatcctttatattacttgtaagcaaatgccctgtctgaggatgtaagaagggtctaatttggtaatagaagaaagggacctagtttcataaatatcttcccagacttaaaattgttgattataaactggattaccttttacttagtgttttcttaaaaccttaacacttttctgaaggtacctctttaaaaaaaaaagtttacagagaacttttagttagaaagatgtgcaaagtgtctctttcttttacctcaatgatactgctctttggaagcaaatgatttaaagaacaaattagccatttataagatgatatgtaaatttattgctaatagcaraaaatttgtaacaagccaactgttcaacaatagagaaatgcttacataaattataatactgtacaatttctattacatgtgtattcctacatatatgttcttttatccgtcaatcatctttttattaaagcatgtgagtgtaaatrgtaggcatctgtgcagcttctccaaatatgctaatttgcatatcattatctaagttcagtatttgtgtaaagatttatcttttagtgtgaaatctgtgcaaatcttatgtgtacattcactgagttttgacaaatgcagatacatgtgtaactgaacttatgactttccttatagaaacttcagaaagttccctcataccccttatctcaatcttgtcactaccccttttccctcaggcaaccaccattctgatgttttttccactatagaataagagttgcctgttttagaatttcatataaatgcagtcatacaatatttagtctttctgtaagacttattttgctcagcatgtttttgattttgtaacgtgtatcagtagtttctttttactgctgagtagatttcattatatgaatatgctgcagtttgtgtatcccttcaattgatagacccttaagctgattcctgttttggctattatgaataaagtcgcaatgaacattcttataaaatcctttttgtggacacggattttctttctcttgggcaaatacctagtattagaatctctgggtcttagggtaggtaaatgtccggttttataagaaactgccaacacctttccccaaagtatatgtaccattttacattcccatcaacgatttttgatggttgctgtttgattttgctcttgttgcccmggctgtcgtataatggtgcgatcttggctcactgcaacctctgcctcctcggttcaagcgattctcctgcctcagcctcctgagtagctgggattacaggcgcccaccaccacgcccagctaatttttgtatttttagtagagacggggtttcaccatgttgaccaggctggtcacgaactcctgacctcaggtgttccatccacctcagtctcccaaagtgctgggattacaggagtgacccaccacgcctggccttatatatcttttatgaagttttgtcctttttttttctactgggcacacttcagttttattcagttttgttgggttatcttttattattaagtttaagagtactttatatattctgcatactagtgctttgtgggataaatgtgctaatattttctcccaggctatgaattactgattaattttcttaatgagagtcatttgaatagaaattttaaatttaatttatatatttattttatggttattgctttctctgactcatcacctggataagaacttttatctggccccaagtcatagaagttctcatacatatcctatgaaaatctttatgattttagctacattttatcagatgtgactatatccacttcagtattcttatgctgtgtgtggcattttttctattcattcactttcaatcaatctgcctttatatttaaagtgtgtctattatagacagtatatatgtgagtgttgctttttaagacattctgacaatctgtgtcttttaatctacctcattaactaatattgatacttccaattcaaactcagaactatagggtttttacttacctcttctatgttgcatctggccatcatttcttccatacctaaacttttatttttcaaggacctgctaagagctgttaatgttgaaggtctgatgagaatgggaatttccttcccttagccttttttttttctttctagatgggcaaaggattttttttttctcttccattaaagaccagatattctattacagtatgtcttggtgttcgtttctctagatagattttctcaggtatgtggtatggcttttctttacatagtttcagatcttttatttcagaaaagtttctcaaattatactttttattattcgttcttttctttttatgtatattgaaactttgcctcttctaaatttgtyacttgctccatttctttaatacgatatatgtaaaatttaccattttaaccattttaagtgtacagttttgtggcattaagttcattcgccatgttatgcagccatcaccattgtccatttccagaacattttttgtcatcttaaataagctcttgtacccattaaactatgtctatctgcccccaaacccctgataactgtcactttcttttgaatcctattaaaaaatatatatcttctttttttattaactttttttctcctttcatcttctatttttcttaaggcaggagttggaaactttctgtaaatggccagatagtaaatattttaggstttgtagccatatggtccctctcatagctactcagttttgcttttatactgtgaaagtatccatagactatatgtaaatgaatgagtgtgattgtgttccagtaaaattttatttatgagaataggtgatgggccagatttggtgtatgggttgtagtttgctgacctctgttataaggcattatatgtggcattttttccattttgtgttctttcttttgtagtcctttcttgaaattattttttcttttattttgaattattttctgaactctctccttttatttctaactcaggcacatgctatacgttcatatcttgtatcattctcgtattctcttttagctagtgttaaaataattgattrtaattttgtctgctttgtgggcatttttttctgttaggtattaattgtctgcggggatgttattctccaaattcttcttgtaagaattttgtatgtatttgacctcagttactttcgttgctcatttttacagaaattaattactaaataatttcaaggataaaaataaaggtctgagatagttaaggtaatcccccctgtccctttttgttgtgctacacctgcagctctggcctagaatagatcaagtctctcagtaaggtctgcaggatcatcttttacagtagtagcatttaaattatgaaacatcatcattttatacctctgtttatataacctatgagacattttttcaggaaccttaaccggagacattgtgctaagggcattttatagataaagtctcttcctgatagattactatttagtctttttggtaagtgtagtccagtcacctgtaaagcattccctaccccatcaatgaattgaataggtcacaggccaggtgttctttcctgacgggaagtgattctttgacagttaacaggccagagaaatacattgggaggataggaggcatatcatcaaaggtcgagttgtgagcataaatatgttwaaaaaaaaaatctcaagcttagaatccagaagaaaagtaatcaaggaatgtgaataattctgagaaaataaattttattgtaatgttaggtttggttttggaaaggaataaacatgagctctgtgatgacatgagggagaaaacactatagtagtttagtctttaatatttttaacagcctccttttgtgtcatagacaaagaatctttgggtagcttactataaaatattgcagtagataaaattgaaggcagttgcttcttacctttttatttttccccatgtcattgtccttgaagctactttggcttatgtttattcttctgatagctaagttttggtgtagccctgctcttgaggcacctaataccatgcatcattaatagatacttatagtaagaattgaataggattagttaagataagatgggttggagtctgagggctaggtgcagcctccccttacggggyttaataaaaccaatgaaacatacacgagaaagaaacattcagaaatggactttcagtttcttggtgaataaaaagcattatatcttcaagaaaaaatgagtagggtgggtttcctagggatttctactaaagcctaggagctcaggataaccccggggctcattaaaaaaaaaaaatcactttgatttcaastaattgargaaagttttaggtgttttgtttttgtgtgcccgttgtttttcttttaaggcttcatcagatgtctaagtttgctttcacyagagcgagttactgagttctcttctcgaatcttgttttgccagtttgttcaggtatctgtttatagaattaaagcagcgtgagggtaaacttttttttaagctgttttttggagtgtgtcagctccccattcaatttagacaagttatttatttatttatttattttggttttggaaragggaaaataacgtgatgtaaaattttttctctatcccttttgccttttcagtagaacaaactaaactgctggtaggtggcagatgtttggacttgtttattttttcttctktggtatattttcttttaaagtgaggaagcatttggtagttagcagatgatttccatgaactacaagtccaaactgaacaaaatttgttttaaatttactgattgactcaaaaaaccttaaagctatagtctctgtgtcattagttcaaaaataaactaaaccagccaggcgtggtggctcacgcctgtaatcccagcactttgggagggcggatcacaaggtcwggagatggaggccatcctggctagcacagtgaaaccccgtctctactaaaaatacacacacacaaaattagcctggcgtggtggcgggcgcctgttgtcccagctactcgggaggctgaggcaggagaatggcgtgaaccccggaggcagagcttgcagtgagccgagatcacgccactgcactccagcctgggtgacagagcaagactccgtctcaaaaaaaataaaaataaataaaaataaaaataaactaaactccctgatgccttgttaaagtgtgtgtatacacacttttttgtgtctacatgtatataacttattatatatgtcaaattatatgttgacatatatattatatacatagtaagtagacattgaaaagttctgatgccctcattctgataatactcatcaaccgtagaaaccattttgacattctcatcagtcatgttaataagatgtgcaggtctcctcttccaaatgcttgggttattctcatgttgactgtggaaatttggtattttcaaaagaaatgacatagaattacacttagttaatacatcttagctatttttttctaatgtcttgaggtaccaacttatgtttttcttctttgcaggaaaatattcttatttggaaaaagaaaactttttggataaatttttgaaactttgagcaagctatcaaaagttgtctgcctcctccttctccccagccccaaaatacacagacttaacaacagaaaaatataactgttatcctatgttaatttatgaaagcagataaatatggggtatataataagataatttcattatttaattcaatgaattgcttgttttagtgctctgtaagtatttgaacaagtaaactttttgagttaannnnnnnnnnnnnnnnnnnnnnnnnnnnnnnnnnnnnnnnnnnnnnnnnnnnnnnnnnnnnnnnnnnnnnnnnnnnnnnnnnnnnnnnnnnnnnnnnnnnnnnnnnnnnnnnnnnnnnnnntttgagacggagtctcgctctgtcgcccaggccggactgcggactgcagtggcgcaatctcggctcactgcaagctccgcctcccgggttcacgccattctcctgcctcagcctcccgagtagctgggactacaggcgcccgccaccgcgcccggctaattttttgtatttttagtagagacggggtttcaccttgttagccaggatggtctcgatctcctgccctcatgatccacccgcctcggcctcccaaagtgctgggattacaggcgtgagccaccgcgcccggcctagcccagtcttttgtcatcagagtccaaggtcacatagctagcttttaagtaatggtgccagatttaaacccaatctggttgtcgtaaaatcatttggtctgtgctactcaaatggaaagttgatagcaatgagaaataaaatctgtattttgtgtcattttgtaatctgacgattcttactgctttctcaagttggttttctggtaataaacgtaactttacaaattttggaaagtacagtaaaaagtagggcatcatcttcccaccccaagggagctactagtgattttgacatattccctccagtccttctcttaggcatttaaagtaaaacttttttgtaagtatggtattggaacatttgcagttactagaatgttgggactatctggtcttttgttcagttgattgtttttataaacataaaaagtgtgattggaagtaatctttgaagaacctcataactaaatggaagaaggaaggatattttagcaactgcyttcttatttatttattttttttttgagacggagtctcgctctgtcrcccaggctggagcgcagtggcgcgatcttggctcactgcaagctctgcctcccgggttcacgccattctcctgcctcagcctcccgagtagctgggactacaggcgcccgccaccacgcccggctaattttttttgtatttttagtagagacggggtttcaccgtgttagcgaggatggtctsgttctcctgatcttgtgatctgcccgccttggcctcccaaagtggtgggattacaggcctgagccaccgcacccttccagcaacgactttctttaaaagactatwtagagttgttagaaaatctcgtagataaattttgctgtatgttttgactcatggaagaagaagttaaaaattttttgaacagtaactgaaacatattggagtcacagcagtttgaaagtatgtaatgccactgaactctacatttaaaaatggttatgatggcaaattttatattatgtgtattttaccacatttaagtgaaaaaaaaggggggtatcatagtggacattttagcctctcyattgtcctggagcgtttcttaatattactaacacgaaatatggaaaatagtatatttaatagactgaatctctgcarttatgttgaggatactcttttcatcttatctgttgattcacattttttgagagtgacctgtagaccttctctgtcagtatgaagctcagcattaatgaagtgtttatggaaattcaagcaagstgcmtgcaacttgtttaattaacattcactggggcaattccatggtgtgtttttcccccttggtttgtttctcagggatctggcttgagctgtaaggtttttgagtagttcagtaacagctcgagaaatatgagcaagattatgrgaatggaatgtttcctgcccttaagaaagcttatagtaaaaatgcagtgtttctcaaactttttggtctcactgctttttcacactcttaaaaataattgaaataatttttgtttatgtgggttctgtctatggagacttamcgtatgaaaaatttaaaatgaatataatattagaaattttaaaaataaaatgataaactccattatatgtaaatatgtgtaaacaacattcttaatgaaaagaagctattttctaaaggaaataatgagaagcagcattattttacactttgcaagtcactttaatgtctggcttaawaagagatagctaattctcatctgcttctacctgccaattctggtatattgtttgggttaaagtatatgaagaaaatccttcttcaaacagaaaatgttgttggaaaaggaagaaatattttaatagcattgtcagataattttgccttttttctctttgattctgyacccacagttgataagtaatagtttcctaagggttagttgcaacgtagaatctgaagccaaatcagtgaatttttttatacttctgctrtgtyagaatccattgttagaatccagaaacgggtatacctgtacttgttttgagcatttagaaaatattggttcttgaagctgtgcagatattccaaatgttgacacattttactttgtaataaaaataataagcataattgttaatattgccactaatctcatcagaaaagtattttagaattgggaaactgttaagcttatagcaayagttgcaagtgttacagaattctagtatttccttgaaagctcagattttatcattgggaacaaataccgtttggtttcctaaaagattctaataattcctgtcatcactccctggacgacatcagctattaccatagtttcttagtgtggacatagctccatagcacacacacatcataagtgtaccgggaggtgaatttttacaaagtgaacacacctgggtaactagtgccctgctcaagaatcagaacattatctgcaatccataagctcctgtcctatgtcttttgagtcgttacccctctaacactcatagattttgtctgttttgaacttgtgatacatgatactatatagtcagtactattttgtgggagattcatctatcttatatagttgtagtttgttcattttcattgtttgtrtaattckattgtgggaatataccactacttrcccattctactgttgagtatttgggtggtttttatgtgtgttctattatgaatagtgctgctatgaacrtttttgtacacgtctgtaaacgtcaacattgaaaactttttagttgtttgataaaagcaatatttagttaatttgcatttcttagtcactgttttacttttaaaagacaattggcattcactgtttggcattatatctcttcgtattctttttttcttttgccttttggtgtctttgttatctgtgctttgttaaagtcattgtgaatattttcctggcttgttttaaaattttatctgtaagcttttgaaatctattgccttaaaaagtgtttttttaatctataaacttttcaaatctattgccttaaattttttttgtttgttttcttctattgcttctcctattctgagatcatgcaactgtccacttaattttgttacggtttcattttgacattttacaccttaatctattttaaatttattttgctatatattaagaggtaaatattttaaaaattgttcttttttaagcagatgccaggtgttttttgaaccatttattgaataataaatataggccaggtgtgatggttcacttgtaatcccagcactttgggagtccaaggtgggaggattgcttgagcccaggagtttgagaccagcctgggcaataaagcgagatccctgtctctacaaaaaaatttaaaaagctagccagatgttgtgctgtacctgtattgactgtaatggggatagcagcaggttcaagaggccaaaaaagatccctgagccaatgaatgaaacataatgtcctgggggctaaaatacagggaagagattccagtggcagtgggctgggcagaaccaccagtcccttgctggcgtggtggacagaattaccacatggcccagtggcattaggatgggtagaataaccaactgcttgcaaaaagcatgcggttagtacagcattttcacttgacagcctcccccagcaacctctacctggcaacctttaacccaaaacaaagggcctcaatcctctatatggcccatgttccattctacatgatgggcttgggactcagatgtcccttgtagataatgaatggatctcctggttggccactcttgtattctctagctcggaactgtgaccacacattgaggtgcatctgccatacagggtcattctcagggtatgctcaggctaagtcattgctgtcatgtgtctactgtatacccagtgtggtggcatgtctgtagccccggctactagagaggctgaggtgggagaatcacttgagcactggaagtcaagtttgcagtgagctctgatcatgccactgcactccagcctgggcaatagagtaagacctgtctcttaaataaaaaaataaataaaaatcaaccattaaaaatggaggtagattttgttttttaaaaattacattcgggggcattttgctgcattttcatttgatgtccagttactgtgattcattcattgtactatgtttaaccttttcctccctactgtggccttaagagtaatttctacaacaaattctatgttgaatttaaggaagctacaycaaaaactatcagcagaatttcaagaatccttgtagccttttttcctttttggctgccaagattgatgtatatataggtacctatctatatttagcagtttcttaacctgtatctaagttcacatagcagaaatttgaattctgtcgctttggtaatcgtcttagtcttcacactgacatacataaagtaaaggaattgtagtttggatatactgtgtttgttttgagggatgatctgcttatcttcatgatttctggggcagaaagttagttgattccacgtttttttctttttttgagatggagtctcactctgtcgcccaggctggagtgcagtggtgcartcttggctcactgcaagctccgcctcccgggttcacgccattctcctgcctcarcctcccaagtagctgggactacaggtgcccaccaccacgcctggctatttttttatatttgtagtagagacggggtttcaccgtgttagctgggatgttctcgatctcctgacctcatgatccaaaagtgctgggcctcagcctaccaaagtgctgggatcacagacgtgagccaccgcgcccggggattccatgttgttgccacttttagtctctatttctttctctctgtttgaaccgttctgaacttttttaggtacttgaatataaagagtttctcacctcttgatttactgtgccttactctctttggaacatttatccctatccttttgtctggtaaattgcttattccttagatcttagctcataatatcactttattagggaaggtctctatcccagacttggttaagttttctttgtaaccctatattgtaattatttgttagggtgattattagtcagtgttaagtcttgagacaggatagatttgtactgagttaattcatgatatatagacataagctcacacacgtactactgaattcattttttgtcatgagtgttttcaaccaggatctttctgtgttcaccttagagattttgcatatctgagattaatttgacttttacatggaaataaagttagctatatatgaaattaagtatgaaagtgtcttttctcatagttaaggttgacttcagtcaactgattctttgttttttgtttttagctgatttgttttctttctgaaagactatggcctttgttgttgttagactttgctacaaagtgtccatgctgtttggcactccatgaatatattaatctgaacttttacttcttcctttaattattaaaagtattgtcattatttctacaatatttcctctcttcccatcctctatctctcttacgttttctcttattctcttctgtttcatgtcactagtctttccctaattcctagtttcgggactatcactatagcagatacgttttctccatgaaatatagtaaaacagaaaactttaaagaactttagaagatagacctgtacgagaaagcgagtagaattagaaagtcatgttgagatggggctgctgtgctatatacccctctataattttgaggctgcctcctgcacatcagccaagatacaggtgtcattcgatttttaatagcaaaattgtgaattactgtgtttagtggacctttagagatactcaaaagtgtctggaaccgctagtgttaaactagtgaatggcaagtctgttggccgggaaaaaccttttttttaaactcataggtattgcataaatgtgtcatagctgaattttgtttcattgaaagcaatattttcattgttaagaatttttgttttgctttttattttggatgaaagtggactgataatacttaagatagggaaagtaatatttatgttatatgtatatatatatatatwgcaagccattctcatattttagattctagtttttcttaatgtttctaaagataatgatgaacaagtcayatttgtcaccaagtgcctttttatctttcccaactcagcttctctgatttcctttatgtcacatattaaaagaaaaaccttagtcaaattamatttaacagttaaattgagcaaagaatgattggtgaatcaagcagcctccagagccagaataggttcagagtaattccagggctgccacatggtcagataacaattatggatagaaaaaggaagtgatgtacagaagacaaaagtaaggtatagaaagagcttggttggttacagcttattgtttgccttacttgaacacagtttgaacatttggctgcctttagctgagtctttgtgattggtacaagagtaggttacattcagtttacgtatccagttagatgtatgtatgaagaaacctttaggcctaaccttaaatatgtaaggaggcaacttcaggctaaattaaatttaacacatagatgtatatgagagagttccatgagttattttcctagacaaccccaaacttagtttacagttactttatctgttgggtgtaatgggatctttttacgcttaaaaagcatgagagatgtaatataaatgttctcatttggtatataagtgtaggttaaaagattaatagttcaagtgatgtacagtggttgtagttttgctgacagtctaattagggggaaaatgactttaagatgtgattttgctgccatagataaaaacatcagtttaaaaatattccaaacacctcagatttttctcttttattaaatttcagaagtcatagttgtcagttatatgatttaatattggccatcgttccatggaagctttaattttaggcgggattacaatgctgaacataagtgaatggagaatagataccagtgaccttaaatttgatattgaaatatttttgaaaggccttaatcaactctttgctattagaataaggaaaattgttaagtatattggggttaggctatgtgttaggaatttgggtttcttcactgccagcacaccacatagtatatttttaaattgctttgaatatgtaatataatgttattttttctcwtgaactgtttggggaaagaatgtgctgaaatttatacattatattacttgatatagttgttgcagaaaagcagttcatcggggtacacttcttgttgctacctgctttgcctgacccttcctcaactggcgcctctaaaaatagagttgcttaagctagaaatctgagagccagtcatctttgctttataacctatccatttttctcttctttgacccagctgtactttcactgtttttttccaacccactatcggttcttgcccagactactgcagaattttcttgactagtccctctgattttgctcttcacttgtctgtttttcacatagctgacagatgatccttttaagatttaaatagaatcaagtaatttccctaataaatggtttcccacatacttacaatgaaayccaatcttcttacccttgacttacaaagttgtgacaaatactgttggttatgtaccccaaatttattttcttcaaattcttcactaacagatcttagatttcgttcaaggcagtagtgtgtctggctatgaaagacttgattttttagccttttttgttttttttggtagctggacagatgacacatttttggccaatgaactatgtatgaaagtatctggagatgccatttcttccttaattataaaaaagtcaagagagaaagctcccccgcgcccccctttactcactctcccttcttgtctgagaacctagatatgaggcttagaaatatagcactcttgtgactgtgaggtaagaagcaagtggagatgctaagaatgtggaaagattctaaggagctcctaataccgttgataaactgctatgtgtgcctggattgcctttgtcttgacaaattgtgtgagacaagtgaatctctccattatctttttattttcttttgacacggagtctcgctctgttgcccaggctggagtataggggcgcgatctcggctcattgcaagctccgcctcccgggttcacgccattctcctgcctcagcctccggagtagctgggactacaggcgcccgccaccacgcagggctaattttttgtatatttagtagagacgggtttcaccatgttagctaggatggtctcgatttcctgacctcgtgatccgcctgcttcggcctccctaaattacaggtgtgagccaccgcgcccggcggataattttttaagaggaacaaggtgggtcaactctaccctactagatatctagacttattctaaagttatactaacaaatagacaaactgaccaaccaaaaagaaaagataaggaaaaataaaaataaaaatttcaactcacaccatagttacaagttatttaaatatctaaatgtgaaagaattataatctagaagaaaatgtaggaacagtacagaaataggaaaggtttccttaaattttatatataaatcacaatccatgtaggaaaagattaatgttcagaatatgtaaagaacgcctgcagaatcataagaaaaagacaaatagcccaaaagaaaatggccaagacaatgaactgacaagagttgaaatgtgaatgcttagtaaacataggaacagatgcttttatcaatttgcatggatttaactatgagtattttaaaacttcaactgacttaaagcctaaggacatttattttcctgcttgataagaagtgtagtggtaggaaattcaagagttggtttcagttctgtgaacgtagtaagggttctatgccagcatttaaaaaaataattctgttgaattttctaacggttgggaggaagggggagaggagaaagggcactcttcctcccacaccttctgtagaaggtgtagaagagagaaacatatttccagaagcttctagattttcccatctgtcctcatggccagtcactgacagagcagaatgaaattacctgattggcttaattaggattcctcctctggactgaggaagggatggctttctcttagtatattatttcctgcccaattcccgagcaaaattgagtctgagcaaaattgagtctttctgttggccagtgtattagtccattctcacactgctataaagaactacctaagacggtaatttatgaataaaagagttttaattgactcatagttctgcaggctgtacaggaaacatgggtgggaggaggcctcaggatatttacaatcatggcagaaggcaaaggggaagcaatcatggtggggcaggagagagacagcagaaagcgggaggtgccaccacccccctctttttwtttwtttwttttttttgagatggagtctggctctgttgcccaggctggagtgcagtggggcgatctcggctcactgcaagctccacctccctgttgccacctacttttaaatctccagatgtcatgagaattcactcatgtgacagcactagggtgatggtgctaaactattagaaaccacccctgtgacccaatcacttcccaccaggcccctccttcaacacatggggattccaattcaacatgagatttgggtggggacacagagccaaaccatatcagccagaagaatggattatggttatcaaccttccactaatatagattgaaccatatgaagttgacaaaaataatgtgaatatatgaaatatattctaatcacatagaatatgaaatacataatatacaaataataacatgaaatgtataaaatataaatatagaaacacaagtgtttaaaaaacacacattgaaaagtatataatttgcatgatataacaaacattgaatttatgtaatagtacctctggggaagcaaagaggggactaggattgagggtaagagttcaactgtattcatatatttagttttcaacagtaaaaaagcaaatatctgaactgaaaaatgtaaataacaattcatttttttttttgcctctttgtaaagcttttaaatgtgcacggaatggtcacgaggattttggttgaaaatgaaaattggtagagggcaacttggcaacatgtgaaattttaaatgtatacctattgatctagtactactactttgaggcatttatcttaaatgaataggacaaatgtacaaggaaatttattttgacttttttttttagtaatggtaaaaatgtttttataatggctgtgttagtccgttcttgcattgctataaagaactacctgagcctgggtaatttataaagaaaagagatttaactgactcacagttttgtagactgtacaggaagcatggctggggaggccccaggaaattcacagtcgtgacgggaggtgaaggggaagcaggcatgtcttatatggtcagggaaggaggcagaggagagcaggaggaggtgctacacacttttaaacaaccagatcttgtgagaactcactattacgagaacagcaagagggaaatctgcctccatgatccactcacctaccaccaggcccctcttctaacactggggatcataatttgacatgagatttgggtggggccacaaatccaaaccaaattttttggtccctggctcctcccaaatctcatatccttctcatatttcaaaatacaatcatgccttcccratagtccccaatagtctcaactcattccagcattaactcaaaagtccagagttcaaagcaaagcaagtcccttctgcctgtaaaatcaaagccagttagttagttacaagatacagtgggcgtacaggcattggctaaatactcacattccaaaagggagaaatcaaccaaaacaaagggcctgcaggctccatggacttcgaaacccagcagggcagttgttcaatcttaaagttscaaaataatctcccttgactccacggctcacatccaggccacaccaacacaaggggtgggctcccaaggccttgggcggctccacccctgtggctttgcaggagtcagctcccatggctgctctcaagggctggtgctgattagggaaatggaagtttgcactcaggctttattcagatccgtagagaaggagaataattcaaccttcctgggtcaggacagcacttatggcccagtggaagagtagggcattgatggtagagggaaggaagtcgaagtyagagaattaaagaaaacctaacatccgtaaagttctgcaggtatttaaaaaacaaaaccargaaccctggtaagatgctgacagtttacttgagcatgtaccctatgcttttactgattcagttactaatacaaaattgatcttttcacctaaaattatcagcttaatttttaaggatattttctacggaaacctcattctgactttgtaatacatatctgtggaaatgtrtgctttactttggagactttttcttagagcctgcttttctggaatgaatgaatttctatagatagcatggaagacatatcttgagataaatttcttttttccccttactcttttccacatggtttttatttgtttaacatatgcccaaaataaaggaagatgtgactcttttactgtcttttatttttatttaagatgccattttgtaacagtattacacaataatagtagaggtagtgatacctagttaataagacctaatacaatttaaagtgggaaagaatcattaattaagattctagcttgtgaatataaaaatgcgaatatttgcggtttccttttataacccattgcaatttagtttgtaattttaccactatactaaaattagtttaatattaccaatggccattgttttcttctccgttgatctcattaaatcctcatggtactggactttgcataatgttgttgttccttgacttccacgatgttgatgttgtgctttcttagtatttcttacytttctaagtgtttgcctcatccttagactrcttgagactctttctgactccccctaaacccccatttttgtctgaaaactgtgatacttcttataaaattctggttttatattcccaagtgcttgtattcccactcatttgccatatcgtttcctcaaactaagtgaatccaagcttgaattgttccagttcaccacccatttcatatagtttggccactagccccaagaatagatattttggcatcatctttagttcttccttttcaaaattccctttgaccaagcgttcaccatgtgtttctcatacccatacattcatccccaatttccctaatacaatgctgtgtgttgtgatttgtcttagattcggttatcagcagtatttatttatttatttttattttattttattttattgaggagtctcgcactattgcccaggctggaatgcagtggcgtggtctcggctcactgccatctctgcctcccaggttcaagcgattctcgtgcctcagcctcccaagtaggtgggattacaggtgcctgccatcacgcctggctaatttttgtggttttattagagacggggtatcaccatgttggccaggctggtcttgaactcctgacctcaggtgacccgcccacctcggcctcacacagtgctgtgagggtgtgagccactgcgcccggcttatcagcagtatttaaataacccttgtttctatgaatgtagtgatgagtttctatatacagttttgtgttgtgaagcctgaggggaaagtgagttcctggataagtcttgtcatatttattttgtgtttctagcactgttgcacagcacatattaagtgtttagaaaatgttttttgaatgaacagcccaaagactaaaggaagagcttccttagttctaaattctgtgaaatgagtcagtttgaatgaagctaatgtttcttttgttttayaccatttactatagagtgcagtacttcagttgttcatacttgttgatattgttacagatattctaatggttctttttacaaaatcaaatatatatacaagacattttttcgtttctttttaggttttggaaggaaggatgttgtagaacacttactacagatgggtgctaatgtccacgctcgtgatgatggaggtctcatcccgcttcataatgcctgttcttttggccatgctgaggttgtgagtctgttattgtgccaaggagctgatccaaatgccagggataactggaactatacacctctgcatgaagctgctattaaagggaagatcgatgtgtgcattggtaagtatcatttgatgatatctaaattttaaataaaggtttattcttactwtttttgtggtacaaatagtgtttcctgagaataggtaaggaagggtttattgcttcttgtagaagcagttcttttccatcaaaaggtaaacagagagatggtaatctaaagttacttaggggaagactcacaacattaactttccaaatgcagtcaaatgcctattgatgtggaactcaattttaatggattactattgtcaaatttagttaatttatagtctcttttaaagactggacattttctatcctaccatcaatgagagccattataaagtacaaattctactgagttggatgacatttgaacacttgaggttgattcaaggaaactcatctagtatagtagtccccccgcttatatggggttttgagtgttttgaatacagtagttcagaacttaatcgtttcaatatgtgccatagtctagagaaaaagcaatttcaaacaaattggacttttcaatcattttaggtatctagatgaaacgaagctgtattcaatcagcattttgttctctcatatatattcacattttgctttgctgtatacaattttttattttgaaatctaaaaagcttctagagggcaagtataatttctcttgagtgtatcatctgttttttgatacttgagatgatggatgtttgtttagccatggcaggttgatttacgtaattgtcttcccagatgtcatccacttcagcataatcagttttttaatgatgcaactaaaatatacatgacattttaaaagatatagtggtggtgcttaataatggttaagattattcctccttatagccatctattgcagcttctaatatatttttcaatattcctcaaattattgcaatgcctgatataaaactattttttwaaaaaatcacattttctgtcattatcctttgctacttgagcatccactaacatgacctttggatatcctgtcctttcagttttttgacatcttccagtttcaaytgactctcccatttcctcctaagtctctcactaacatagccacatcctggaccaagtcattacataaaactaccttgagaagcttcaacttataacatcctctctctgactacaaagcctcttatgttacttgcttttgtaaatgataactattattgagcttggaatgtgtttcctacgtagtcttctaggctttcatcttctctgctgtaactgcttcttgcttcaccttgttgtcacagccactggatttttctcagtcattagtcagaattttatactgttctcactttcttaaaatattatcctttccaggcttcagtcttctgttttcctgcctctacatctgaagttttcattttatcagtcctttgaatatcttattgaaattagtatttctcgcctcctcctcttaatccctctttcaaaagtccataatgtaaatgctctttttatctaggttctattgaaataaaagactagatatggggcttgaatttttaatgaatggatccctgcagcactctacttcctcagttcacagtaggctttggcacatattgtcttcattctgtttaagttcttgtgccttataaaagttgagggaaggggaagggcacctttgaaactatactcaaaatataaatgaggatatagttgctattaaagtatgtatcatagttattatgggagtcaaaattggttgtaaaccccggtatacttaattagcttgcagaaacctcttaggaggtttattctgaggttcactgaaacctgtaatagcttatatatcttattttctggagttgaatatggttaaggaattctgagatttttctctgtaaggcagagttctgctttgggatagctggataaaaaaagtgggaagccttgttttttttttgtttgtttgttttccttttgctggagtctagtagtttttgagagattagtatacaaaattgatttttaaaaggtttttgcctagatgatgaaatactggcctgatttttataaagattaatcatatctctatatgtggggtagaatagcaaatacatttgatatttttgaaaagctagagcccagccaagccacattaccaccagcttacaggagacatcagggcaggttgctgtagagcacatgctccaggcttataccctgaccccaccagtttccagctgtgtgaggccatgggccactttcttggcctctgtctttccttacatgtaaaatgagaatactgttcttcacagtgttcctgagaggataagctagtacatataaaatatttagaagagtaccaggtacagtgtacattcagtgaatattaattgccattattaattactattattattgttggtgctaaaatctcagcctgaattatgctcctgtgtggtacagaattcccatttcctctgtttgtcctttgttgacatttcttaaaaatgtccatttaggggcaggcgcggtggctcacgtctgttatcccagcactttgggaggctgagatgggcagagcacgaggtcaggagatcgagaccatcctggctaacacggtgaaaccccatctctactaaaaatacaaaaaaattagctgggtgtggtggcgggcacctattgtcccagctacttaggaggctgaggcaggagaatggcatgaacccgggaggcggagcytgatgagctgagattgcaccactgcactccagcctgggcgacagagcgagactctgtctcaaaaaaaaaaaaaaaaaaaagtccatttagaaatcttgaacccatgtgtttctttcatagatgctatttaccatcaaaaagaagaaaattcaaactgagattattttaaaaatcaacttgaaatgcttgtataattaaacaaactacttaagactgtggtcttgggaatgttgatgacagtttttatactgtaatgttgaattgaatttacttcagaaatcaatacattttctgcctttagaacttatttatctttgcttctccctacccctcaaatatagtctccaaaaccactaaatagcttttctgaatatatgctatatgattttttttttccttttttgagacagagtcttgctctgtcaccaggctggagtgcggtggcgcgatctctgctcactgcgaactctgcctcctgggttcaagtgattctcctgcctcagcctcccaagtagctgggactgcaggcgcatgccaccattcccagctaagttttgtatttttattagagacagggtttgaccatgttggccaggatgctctcgatctcttgaccttgtgatccgcctgtctcagcctcccaaagtcctgggattgtaggcgtgagccaccgcacccagcctgtatggttttttgagactgttagtgcttgagaatttcattttaaaagcaaattataagcatacttttcatggagtctgatataagatctgggagaccgagggtgcggaggctcactcctgtaatcccagtactttgggaggccgagatgggcggatcacgaggtcaagagatcgagagcatcctggctaacacggtgaaacacggtctctggtaaaaatacaaaactttgccggtggaggggggttgcggctggtggtcccggatcttgggcgggcgtgggcggggacaagcctgaaacccggagggagcgctcgctgtgagagagactttggccccnnnnnnnnnnnnnnnnnnnngatctgggagtcggagggtgcggtggctcactcctgtaatcccagtactttgggaggccgagatgggtggatcacgaggtcaggagattgagaccatcctggctaacacagtgaaacaccgtctctactaaaaatacaaaaaattagccgggcgtggtggtgggcgcctgtagtcccagctactggggaggctgaggcaggagaatggcgtgaacccgggatggggagcttgcagtgagccgagattacaccactgcactccagtctgggtgacagagcaagactctgtctttaaaaaaaaaaaaaaaaaaaaaaatctgggagtcacaatggatatttgtgatttttttcattttgactaattagtatccaattctttttctgattttggagattttaaactgtgggcactccttgctgagaggaatgcggaaactggtagtgtcagatcttccttccttctacttctttgcagtcagggattgtcttggtttgtccagtcatgcacttcattttgtaaatgtagaattttgaatacaaaatcttagctatagtaaggaatcatatatagcagcagatttttgctttagtgtgggcagtggcctggtcataatgtttcctactaaaagacagttgtgcttcctmctcttagctctacagcttcttatgtgtttctaaggttggtcctctactctcctgtcatttcagtctaagatagacaatggtttctgttacttgcaaattagtataattgataacagagatcttgagaaggttgctaaatggaagttgcagaatggggcttctaaactgataaatctcttgaatctttatttaagtctcactgccctcacacagtttacatgtataccacacctccatctctccttattctctacaattctcaagagtgaaggagacagagtatgttccctttggaggcctcttccaggtgcctctcattagggaagagacagcttgctggcgtccacagcaaatcattctaaagataacagaggtgtatggtgttccaacgcatgtgggattgtcactgtggaataccccaacatctagacatgaagcccagcaaaccaagtgaaaaataacagcccatctcagccagaagggatgattaagacaacaatcagaatacatatccaggactgctaaaggagtcaggtaaatacctgaataaaaaaaaaatatctcccagagaaattaaagtataaagtggggaagaaatttcctggggccaaaactcaaaaccgaaataaaaaaaaaatccaccacctaatttttttttcagaggaaacaatttagtagatgaattaaagaccatgttagtagcctggaagcttacgtgtgagatgtacagagacaaatgttgaaacatggaaatcatgacgaaaaaggtaaataaatctgggaacatcaacgtcattttaaaccttacacgtgatatgagtttcagaggcaggggaaaaaagaaaaaaaagtctgatggaagagatcagtaataattaaacaaatgataagaaagagaaacctatcttgagattgaaaaggctcagggagctccatatgagattgatgagaaaagataaactgagtaagatgtatattgcacttttccagaaagaaggaataagttgcctacagagggaaaaaaattaggcaaaggacttttcatttacaatattgacagcttgaagacaatggaataaccttctaaagcctgctggaagaaaaggattaagttgtaatttccttgataaagaacagttctgcagccttttgggagtaagaaaggctgaatcaagcaagtgacattacattagagaaacaaagctcctgcaactttctttctctatactttcaaacaattcttggtttaatttgtcttatatgcagagactgaggggatcctcactgaatatctttcttgggagcgcaaaattcaagctgctctttaaaatctaacaattaggacttaaaaaaaataactgttttctggctgaatggcattacgtaatagtggttggagtcaaagagacctgttccttgagtgagttgtttacttctttcagcattaaaatgggaatgagggtaatagctgtatgtcatacagttgttaagaggattaaatgagataatatacgtgaaacacccttgtacaatagctgtatattttatatataataattagaaagtacatgctcattatttggcaactgcttttattatcgtgaaataacatgattagaaatagttttcttcttgtattacattatattgttccagatacttttatatttactgaaaatgcaagaaaraatagagatctgatggtatttttctaaaaagtctctaagcaaattggcttcttaggggaaattaagctgactatataaagatagtattatttaataccataattaaagttggttatctaaatgaactaatgaaagcaatttgttgtaattcccatttttcccatcccagttcagaacttcaattgattatttaatatgtaataggatttctgctgttttttttcccattatttatacttcagggactccttgttataaaattatattttatgattctgctgagagagagcaaaaataaaattatgctttatctcttcttccccctcctttgccttggaaaagtaggggacataccttagcttgtgattattcaactaggtaaaactcagattcattcagtcaaatgtaatatatcaacccagataagatcttggttcagaaaaaaatgttaaaacagccagtattatagaatttatatttaaattataatatagtctatataatttatatctaaaacgtgtgtgtgtgtgtgtgtgtgtgtgtgtgtgtgtgtgtatgaagttaggtggtaaataatccaattgacttgttaagttttgggctaataatatgcagagttatcagcaatagggaagactgaagactttgctcctcttagagtaattgagggtcaccgtggtctgctgcgaagaacaatgaaacaggagtcggcgtacctggagagtactgttgggtctcccgttagaaagaaccatatacatataatgttatgctttaaaaactttttataagaagttacatgctatatgtggtaggcaaataatggttgaaagatgttcatatcttaattcctggaacctgggaatgttaactttacattgctaacagaaattaaggttacagatggaattttggttgctaatcagttaatttgagatgggaagattatcatggattgtcttggtggacccaaagtaatcaccagattccttagaagtagaagagggaggcagagagaaagtcagatgatataatttcagatggattcaagccaccattggtggctttgaaaagagagaaagggttccctaaactaaggaatgggggtagccccaagaagatggaaaaggcaaggaagtaggttttcatgaaagtcaccagtaaggaattcagccttgccgacaccttgatttttttttttttttttcttcaaatggagtctcgctctgtcgcccaggctggagtgcagtggcacagtctcggctcactgtaagctcggcctcctgggttcacgccattctcctgcctcagcctcctgagtagctgggactgcaggctctgccaccacgcccgggtaattttgtttttgtatttttagtagaaacggggtttcaccatgttagccagggtggtctcgatctcctgaccttgtgatccgcccgcctcggcctcccaaagtgctgggattacaggcgtgagccactgcgcctggccgacactttgattttagcccaatgagacttacgtcagatttaggatctccagaactgtaggagagtaagtttgttgttgttattgttttaaaccactggatttgtgataatttgttacggcagcaatagcaagcatatattataaaaacatcttacagcggttttgcaaaatttatctaggttgagcatctcctgaaaagagtagtagaatgttttcartacaattaaaactgctttcttggaaatgcttaaagatttggtcactgaggataagtagcagttttttatgttggcaaatatacaagaatgatacttgtaagaattcttaaaataattataaaaaagcagataatgtagtggactcatatttgtgcttaaatgattgtttctgaagtattttgagatttggggtaaattatcttactaagaaacttaaaaaaaataaattttgtgtcaaattaggtgtggagagtccttgtccttatacacttgtttaaactgaacattttctttgtaatctttgtaatcaggtgccacataaaaaatgtttgaaagacatgtaacttgacaaccaaattgcttctttttttttttgagacagtcttgctctgtcgcccaggctggagtacaatggcgggatctaggctcactgcaagctctgcctcccaggttcacgccatgctcttgcctcagcctcccgagtagctgggactacaggcacccgccaccacgcccagctaattttttatgtatttttagtagakacaggatttcaccrtgttagccaggatggtctctatctcctgacctcgtgatcygcccacctcggcgttccaaagtgctgggattataggcgtgagctgccgcgcccggccccaaattgtttcttttatctaaaaaggggaattttattgtctgcaatatgaggcatgattaaacattttaggttgaactgaagactagggccccaatatttctttcttttctaccttttaattcctgtgactttgggcagattataaggtctgtgcttctggtgagtctgtttctgaaacacgtggccatttataaaggtttactgtgtgaagtkctttcagactgttccatctctaatgagctgcttggcctatggttcttttagtgaccaggaaaacaaaggaaaagtgatattgaaaccccatagccttatttcaaattagactaggaagaagaagcttatccaagttgagagggataggttaatgggytaatcggagtggggaaagatgacagcattcagcacatcatggatattattgtcatagataattgaatatatgacaaactcgattggtatgggaatttgtcctcattagtgtttgtgactgaaaacgggattatttccctgctcccactgaacctattgacatgagaaaaaatctatagctagagattttgctcagtgagaagccttgaaacctgtattaatgaaacaataatctactttcacttgaataaatgtaatcagaaagtaggatactagaagcaggacatacattctgggccaagggtagcagcaggatcagcttgactaggaggttctagaacctagtagtggagttagctaatgaaaggtattgtttataaactagaggtctcttgtaaagcatcagataaatatttgaagttatagtaaataactgcatgtaaagttggagacagaaacacaccagtcaggaaaaccaagaattttgaagtaaacaaccaagccagctccaagaactttagcagcagaggtatgtcagccttctcattagaatcctcccttaaagttgctgtgaggtcttggcttcaagtccactcttgttgctaaacctgagatgcaaagaatctgatgccccactttgagttagatgttgacccttaatcagttagctttagtctcagagacgtttcctagtgtggacttggcccctcgggcctcaccactatacataggaatctacaactgagagtaaattgatatagcggggctgggagccacgtgggtgaggaagagaagaaagtaaaaatgagcttgattttgattttggatcccttcgaaaattgattactgttaatattctttgaaccatctcatgccttcaacgaagatcttaatactctttgtgaaagaagtcttctgataatatgtttctatagctgtccacaaactcttctgaattaattctatatgcatatactgccacccaacacgtctcctctgttcatgtgcatgctccattcattgtcccgttgaatgttacgtacaaaatacaagctaagagataagattgctaagaatttcaggtggtgacagcagagcattggggccctgtgcaactgcacagcttgtgtgttcgcgaagctgcccatgattagatcacagtatgtgcgtgtttaaaaatgctccacataattccaggtgtacttaagtaacacccggactcatcttcagggccctccttggtctggctcccgtctacatcatggacttcatcctcatgtccctgtaattccctccctttctctccaccttccagctacaatggcctttttgtctctctaatgcaccaaacttgttctgcctgcggtactctttccccrgatttttcactaataatgttaattcatctgagttgtgccctgacaaagctgtcataatttcttgccctgccctgtttgtttgattactcttttatcatgttttattttacaccatagcacttattacctggaattatatccttatttaatcatacatttacttgtttgtttgccatctgtgtactcttcccaactttgtgccttaatataaacacaggaacctactctgccttactttgcaccacatccctggcataataaagctctgtgcttgctccgagtaaaatgcctactctgtgccagaacctcagtgtggttttaattgcatttgcctgataagtaatgatgttgagcatcttttcatgtgcgtgtttgccatttgtatgtattctttggggaaatgtctattcctatctttgtccgttattaaattggctgtcttttcattattgagttatgatagataaaagtttcttactagaaaaatgatttgcaaatactttctcccattctttgtgttgtcttttcattttcgtgatattgtcctttgaagcacagaagttttacattttggtgatttgattaatggttaacattaaaaagtctgtttctgctttcgttgcttgtgctttggtatcttatctgagaatccattgtcgaaccctagatcatgatttaactctgttgtcatctaggagttgtaactgaaatgtatttaggtctgatgcatttggaattgatgtttggagatgatgtgaggtgaagggtccaacgtcatgcctttgcatgtggctatccagttttctcatttagttgttcataatattcctttataatcttttatttctgtaagcttagtaataatttactccctttcgtgtatgattctagttaatagagttgtcttttattttttccctaggtccatttggctaaatgtttgtgagtttatattgtgtgtgcatatcgttagtttttttgttgttgtatggtgtttcattgtatggatgtagcacagttggtggttgtttagcttgtttgcagtttgtagctgttataacgctggatgtatgtctcagcgtggacatgttttttcacttctcttggatggatccctgagagtgggattgctgggtggaatgctaagtgcacattggactgtaaaagaagctgcgttgccctaatggctgagcatgttgagaatatttttatgtacagtggtcattcatgtatattttttgtgaagtgtgcatatcttttggccatctttggttttatttttattttttgctgttactgatttttgagaattctttttgtgctgtaacaatgggtcttagttggatgtgtgtattgtgaatgctatttcccaatctttgctttgcttttcgttttcttaatggtatctgtatacaggcaaaggtttttaagtttggtgaagtctgatttatcagttaaaatagcaaagtatttggtgtttcatcagcgttggaataataagatttctgcttgacaattattcttaggttaaaagcagtatatagagaaataacattatcgttttaattacactgtggaaattcaggaaagcagtttccggtctgagggctgctgcttcaaatgctttctaacaacttgcttaggatatatttttaaagattaaaatgaaagaatcagctatttcatgtgaaaacttgaatatattataggactcatttttaagatttaacagtaaaagccaggtggactttaactaattagaaaataattatctaaaatatgcacagttatttctgagatgacattgtttgcctactattggcaagtatatttccaaaatttagggaaataggctgtttttaatagcttgttgcctgaaatctttccacaaacgaagacttattaattcccaatacttaaattttttttggtttgtgttttcctttaatgtgttctgttagcattgtgaacattatctgcttttcaaggatcaaaagactcacagatgttcttttagctatttcttcatcttactggctttagtagaattctcatacttttcatattcccggtattaggagacaggaaatacaaacagattaaagactcaaagactggtctttatagttctagtatattgtaaacttcctgttcttcttggcgtctagaagtagagtagttctctgtgcactgagtatgtttactttctaacacagccacaggatgaggtgccagattcttaaactgaatcaggtaaggtgtgaagttaagcatgtaccacgttctctgtggtaggaactaacaataatcttgtccactttcatacgtattcttattgtctatcactgatgtctaattatattcaagaaacgtgtgtgaagtgacaaagcagttcactggaagaaggcttgattctgtctgacttttttttatattactctgtgttacatggataaggaagctgagtaattttctacttcttgattaggtgatatcttgagattcctttattttaaagcaatgtgaacttgcagtatgtcagacacttcaatattcatatacaaatataaaacacattttatagtcatatgcaaattatgtttagattatcttccatttgtcaagtaactgcttattcttcattaggatgggcagttgaatattgattctgatcatgcattaacttttggttataatgggttttccacaaaggatagtaaaacattttttcttgttaacttacagattaaacccatgaattgcccctcttgggagctgaggagttgaggtagggagggataagaaaaaataaggtgatggtggtaaatttataaaagttgctgtggatagttgatacgtaatattgtaaagggttttccctcgaggcctctcaaaggacttagccaagcagtgtcactaatatttgtgtcctgtgtgtgaggcagatgattcagattacctaccagtttaccagtgaagaaggagaaagttgttactttgccacagtctgtagagctgatagaaagttgttataatggaaatgttttcttaattgagaaatgaaggttctgttcacacagtgggcttcatttaagaatacatcatacatataaaaggttaatttcattctgtaagtctgccaaattaattcttttaaattatttttagcttagcttttaaaaccgtatcatatttagcaaacttaaggtggaaaataatcttcaccaaacccccttccccccaaaccaaaaaactaacctgtctacaaaaatttaaaccaagtgtaacttactcctaaagtaatacctctctgttaatttccttataacttccttttgtgtgtctgctatttagaaagatatgtttcatttccttttacaaagtcttttagtttaaaaaattatctgaccacttccatggttacttgtcctttgatgaagttaacatcctggaacttggaatggcacgggattggggatgggggaaagaaatgtggaatgagtgttcaactgcctttggtacattcttatcccytgatatttatttatttatttattattattattattattattttttgagacggagtctcactctgtcacccaggctggagtgcaatggcacgatctcagctcactggaacctttgcctcctgggttcaagcaattctgctgcctcagcctcccgaatagctgggactgtaggaacccgccaccacgcatggctatgttttgtatttttagtagagatggggtttcgccattttggccgggctggtctcagactcctgacctcaggcggtccacctgcctcggcctcccaaagtgctaggattacaggcatgagccactgcgcccggctatctcctgttattttaagtatagtattttgaaggttaacaactttctgggttttttcttaacagcattattagaagtgatagttgcccattaaagaaaaatgagaaaatatactgatgrtaactctcacaccttgttttttgtctatttagacttgcatggtccagtgtgatagccattaaattaaaatcaattacagttttaaaaattaaaaatttagtttctcagttgcactagccgtgttttaaatgcttaatgaccgtatctggctatcggttatcgtaatggagagtgtagacatagaaatttttgttatcacagaaagttctgttggacagtgctgttagacccagtgaacctgtgtatacaatccattttacgtaaaatgagatmattccaccatattatttatttatttttctactttatgtagtaacatattttattgtcagtgaatatttttatataatctcattttaaaggcttctaagaattatttatatagaaatcatcattttttaaaatcagtcacctgttgtaggccatttaggctatttttgtaccattttataaacagtagtataaagaatatccttttcattacatatatgtataaatcttaattgctttaggataaattcctggaaagccacagcttcttaataaggaccaaagaagttttagctactggagaacttcactggacctcttgatttagtttgtcacactgtctatttatatatcatttataaatgagctaggttaagaaaagtcatttctcacaccttctttactgtttgcaaaaattagttgaaaattcagtgaagccttgaaaatctgattcacttggttttgtttcattaatgtctttccttttcctgccagaatacttcccttctgcatttttaccattagttgtccatataaaacctgaattggtatttttttttttttgagacggagtcttgctgtgttgtccaggctggagtgcaatgtgtgatctcggctcactgcaacctctgcctcccaggttcaagcaattctcctggctcagcctcctgagtagctaggattacaggcacccttgaattgggatcttttaaacaagtctcagtgtagcattttcataaaaaacaaagatgacaaaattccatacttgtatccttaaaacagagaagagaggcccagaatgagagtcaytgtgcctttggaaataatctccgctgacactgagtactcttaacgttgatgacttgtctgcttgtgttccaactgctttcaggaaggttagagtagtgtgcatttacctgataaaattgggactgttttaacagttattctgtacaatagtggtagatatacacataacatatatatatgttatgtacttattaattgtgttttattagaattccaggaaaagsacccgtatggaagctttcactcttccaaggccttaagaaatacattgaagatgcttaaattaggtggaaaaagcaaaaaactagaaaaaaaattttcatatacttttttacartgatgcaaggctttacttaatgcccaggtctgtctgtctaataaaagcattacacatttgcatttacttttagactcacttcaattgttcaaaacaatctatgggttaggttaggtgcagtgactcatacctctaatcttggcactttgggaggccaaagtgggaggattgcttgagttcagagtttgaraccagcctgagcaataargtgagatcctgtctctacaaaaaatttaaaaattagctgggggtggtggcacacacctgtggtcctagctacttggaaggctgaggcagaaggatcacttgagtggggaggtacaggttgcagtgagccataatcacttcatgggactccagtctgggtgacagaggggaccctgtctcaaaatacatatatacatacatacatacgtacatacacacatacatactgtagttttcagtgagatacatggcttaagtttggggttgtatgaaaatggtatttgagacaaatgggttgtgtaaccaggcagattttgctttgcatctttatcatgttatctgaaactcatatattattagaagtatggcttccctttgtacagttttaatactgaaatgtggaggtaggtccatatttgagataaagatgtagggagtccttcttactyctcattctcaactgaccaagctagaaaactattaagtataataattgtatttataggctttacatttgtactttacttttaaaaaaygtagtgtcttgtattatttaaatctgctaattatctttttaaaaatatggtgggtattagatttttcatatgtaagcagaatccaagattaagaatgttaaccttactgtgagttatttcatattctactccctgatatgaccatataaataagacttaccaagcattcccactgtgtagccaaagatacatttattttggatcaatacatctgaaatctgaataactctttcagacttttgtgtcaagcctgaaaatttctaaatttactgtggtacacataatcatggctagagatagagggcacatcttttgttttgcctgtttatgacacaggtttgagtgctggtcttttgaaagaataaacttgagttctgaggattgagggaaccaggccaggaaatgttctagtgggtcccctaaaatggaactctcactgtcataggtatttttcaagcgttcccacaggggaactgtgatgggcttattaggaagaggacattgaatataggagtggtatacgaggtattaaggacaaatatgtagatatgccttttagaatttacttctggggaagaaagcttgagtattgttctgggataatcttagcttgcatttatatggaatttaagatagcaaataagtgcttggctttacaattaagtatgaattgcaatgtatcacatacagactgattttacacatttgctttgagcttcagtttcttaattataaaacggacgttggctctactgcataaaatttttrtgggaagttaaatgaaagaatatagagaaagcaagtagagtctcagtaartacttgtttctttccacttgctttcttcttgtatgcaacagtaaggttgccacacaagactatttttgtattctgacacaaagcggacactcartcaaagctcagtgaagggctgacattcccataagctgctctttgttaccatcagcgtgaatttgtgttacattctttgtttagtatcctttgtaattttgtaaacttgagttgtgatttgataagacatgaagctcttttttcctcattgtaatttasattcttttaacctagtgagtggagatattgcatataggattatggagaatcgttaatgtaacttaaacattttccccacaaatatttcaatagcaggggtatcgtggtttgctgtaaccaaatattaagtgtatgaaataattggttaatattttttaaagcagattactcatgagtaagcagctctctttcaagccaagagacatcacagttgctgtttctgaaaattgtaacccactaggaatgagacaaggaaaaggacagatgaggaattatgttaaaagaaaaaggtggtcttttcctcaatgtgggggaaaagttgaggtgggaagtgaaatatgtgattcaatactatcattcagaacaattgataataggataatgtgtcaaatcccatggaaacacaaaactcagtttatttttttaattatttgcttttagctaaataactttcctaaggaatgagaattctttaagttatattctttatgtcctttagattgaaagtacagcagaatgttggcatttcagtctgttgaatcagttgtcagaggcataggaaaataatagtaatgatatatttatgatatactttctcctccagggttcacgccattctcctgcctcagcctcctgagtagctgggactacaggtgcctgccaccatgcccggctaattttttatatttttttagtagagacggggtttcaccgtgttagccaggatggtcttgatctcctgacctcgtgatccgcctgcctcggcgtcccaaagtgctgggattacaggtgtgagccaccgcgcccggccagtaatgayatactttcttaggagactaaaattgaaagcagaatcaaattattactattatggtacaggtttaatcctgttttccttgggagggaggatgttttaaatatgtaagtttaaaccttgtaactagtgataaaaatattaattgccaggctgggcaacatggagaaactccatctttactaaaaacagaaaaattagctgggcatggtggtgcatgcctgtagtcctagctactcgggaggctgaggtgggaggatcaactgagccagtgatgcggaggttgcagtgagctgagattgcaccatgccactgcagtctagcctgggccacagagcaagaccttgtctaaaatatgtgtgtgtgtgtgtgtgtgtgtgtgtgtgtgtgtctgtgtctgtgtgtgtatatatgtatatgtgtgtgtgtgtatatatatatatatatatatatatatatatatatatatatatatatatgaatgaattggtcttcatgttttacacacataagaaatttatctggaatgctagtaagtccgtgaggccttgagagagaggaagtagagttagcagtttagggaaagattcacaaacactgatgaagtgtttctcatgtttatcccttcttctgtctcataaacagattgggaagcaccttttacatgtggtcattgtcccttagagttgtgcaagctttatgatcctattataaatttccctggtcagattgtagagatacttgctttattccttatggacatttcatttagttgaatctagtcaagtttagaaaaagtaatctccccctaaataaaaagaagcataatatagcagttaggtgtggcacaaatgaattcattgttcctagggctattatcagtttacctttatttcaatccagcagatcttctgttagcactgtatatctatttttgaaagacagatgaaaagattctcattgggatacgagagagtgtttattgagttcttgttatgtgcaaagagccaagccgagtttgtatatattgtcacatttaattgtaacagcaattcactgtgttaggtagtgttttatgaaagaggaaattaagattggcagtggtgaagtaacttgcccaaggtcagacagttactaaggattgagcagtattctaaaactgaggtttatctgattcctgggacagaactttcagtcattattctctattgagtttccaggtagaaagagagatactttgttacactcaatcttacatttattccagtatctgccttatcttgtaataaattgttatgtgagcagataattctgattttacaaatgtattgtgtcctggattaactttgttcattgcaaaaaggataaaattgatctgggatataaaaatctgctatgtatatgtacagaataatctatacctaagttactgcagatgtgatgtgcctttttaaaaaaaaaaagtcttgattttctatatttataagwaaacttgrcaacaggcgcaaaattgaattggaagattcttttattattgtaaaatttcatgccagagtttgtccataaagattgaaggagatgcatttaactyattaagtcatatatagaagacctctcccatgtaaaactcagtaattttattcacatggatgaatttttgagtgggtaattaaatattttttaatatctctaaaaattatgtgcataggcttgttttgtcctaacagccctatgagataggtactctaatattatctcctgatttacaggcaaggaaatggaagctgagagrggtaaaggaattgctagggtcccacaagtaatggcagcagaactggtattctagcctgtgcagtttggccccagaagccagcctctgaagtacagctgtgttcttaactctaactatggcatattgccatggcagactttgtagtgaactttatttttttgaacttttaagaattttaattaaaagttgtggggttttttgagatggggtctcactctgtcagtcaggatagagtccagtggtgtgatcatggctcactgcagcctcgacctccttgactcaggtgatcctcccacttcagcttcccaagtagctgggagtacaggtgcacaccatcatgcttagctaatttttgtattttttgtagagacaggtctcgccatgttgaccgggatggtcttgaactcctgggctcaagcgatctgttggtctcggcctcccaaaatggtaggatttcagaggcatgagccactgcgcctggctgaacttttttttaaaaaagaaatgcagtttttattttttcccactgacgtacttggaaaaaaaagttacatgtaatgagacacatagttcactggggtgaaattaatttgttccaagtatgctagtcccagatgttgacagaattctgaattttgggtcacttttatatgaaagacaaagactttcatatatgaaagtatgactaaaaccctggaatttttgaaataatcccttcactattttactcaatttgtttctacagtcagcattattacagaatctaaattaatagatttatttcacatttgtcttatccattgctgttaccatatttaatgttagtcatttgataggaagaatgatccaatttttctttattcgttacaaagtaatttctgtaagcaagagcttttaaaaagcattgttttgcacacatattaaacagcatgcataaagatcatttttgtctgaggatcaatatcccattataaaaataacacatatatgtaataaatactaaaacagtgtagaaatgtataaaatagaaagtggaaatcccgtttatttcactttcagatataacactaaatattcctgttgttaaggtagctgaagtagtttttttatctctgttatgaacccatttgcacatataaatctatttacatatttttaaaacatgaactttaaatttaacacgtgttaaaactttgaatttaacatgtattattgcagtagctactcattgagatatctgcacaagtactctttgctgagaaccaatgcctctttccccatcatcattgtttgtattgcctcttctagttccttggccaaactttttaagtccagaaccagatgctgagccaagctggaccaaattctctttcatgataatttggaactaagattgagataatacaggcgtatgtgtttgtatctcaggggaatgtctgggagacagagaaagacagcaacacctgaattttgaggcacatttttgcctttgcgttcaatggaatacctctattctttaataaattttcctgttattaaggtagctgaagtagttttttatcctttgtgataaaaaagctctatttgataaagtcagtactcaaagatatatttatagaccacagcaccttaaatttagaaggatacttagagatcatctttactatttactactattatcttttctacttatttacagttttactttattgctttacttatttcttatgtttagaaaccacataaatctttcttcaratgaaatataatgcagtagcccaatatataaaagcgttcagaggcccgggagaagccttgcatgtgtatgaggaggtggggacgggtccataggaacctaaagagtagacgttctcaagcagggacagttttaccccttagagggcatatttagctatatctggggacatgtttggttatcacagttggggagtgttaatggcatccagtgggtagaggtaaggggtgctgttaaacataacacacaggacagctccccgccgttaagtgcattcaacagacaagccgtggcaaaagcccgagcctgactacttaggctgttaaagatgcaacaagccacttgtaggtttagctagttgattacttacgtagacagcaaaaagaaggggaagctaaaagtaccagctccccatggtctacgtatcgcaggatgacactgaaaggaaaagggccaaaggactgcactgagagttgtggaataccctgttttggaagagccagtagaagagagagaggcagaaagcccacgcctcctcacaaatgggaagtgatgagatactgcctcatgacagcttcccatcctctcttgttcccagggtatcacaaggcattgagccaccactcagattaactgaggttcatgtctttatcattgtagcctgtgaggatactagcggagtctccagagcacctggtggagccagtagcctacacctacacgcccagcaaagaattagctggtcaagaatgtcagtagttcaaatggagactctatattttagagtagcactgttcattagcaatgtaatgccacacatatatgtaatttaacattttctrttagccacatagaaaagaaatgtgataccaacttaataatgtttcatttaactcaatgtatctcaagtattatttcaacatgtaatgtgtctaaaacaatagtgagatttttaacattatttccagctaaatctctgctatctgttgtatattttatacttaaagcatatctcaattgaaacaacgttttcatgatcaatacttgatctrtatttgggtttcataaaatttgtagttgagaaactaggtttacatacacaaggtgtcctaaatatattaaacatttaccaataactgaatcaactatcaatttttaaatttaactatgactttttttttttgagwtggagtctcgctttatcgcccaggctggagtacagtggcgcgatcttggctcactgcaacctccatctsccagtttcaggccattctcctgcctcaggctcccaagtagctgggattacaggtgcacgccaccacacccagctactttttttattttgggtagagacaggttttcaccatgttgaccaggctgggcttgaggactcctgacctgaagtgatccgcccgccttggcctcccaaagtgctgggattacaggcatgagccaccacgcctgaccttaactatgatttttaaaatgcaactaaaaattcagattatcagtttctctagtcacgtttcaagaatgcgatactcacatgtggctagtagctaccatattgggcagcataactctagaacactgggaarttactaaccattttattgctaaagagaacaggctaagaccacacaaccattacttctaaacttttctcctgacacccagttcagttccctgttcattrtactagaatacctgttcttaaatctctattttagaagagctttatgagtaaggcacaataggctgtacatgatatgatgaggttctcataggttcctccaaaggatattaattaagttgaaagaagaaccctggtttattaagtgaatgtcaccgctcattcagtgctgaagataccattgtgcatcaaagaaatgtttatcttatgttctcaagagaaacwtaatagcacgaggatattaagagagaacagaactcatcactctttttgtgtctcaaatttaatctggtatacagagtcagtgattattttctttgaatggtagaagtcaaagaacttcaatgagtagtttattcagaggtgaaactcttctgttaaaaaaacaaagatgttaataattgaagaggattctaaaaagaaataaaaagaggaagtaaaatwctttaaaaatgcgaaattttgcaaatgaaaataagtactacatttatatcaaagagttttgatttgtttttgtttctctgatttggctaatcagacatagattatgccttagttgcaggatactatatatgcattataggcacattacctcagtgtasatatattatgttcactgtacattgagctcatcatgttttgaagttttggagatttcatccctgttttattaccttttgtacatatactactgtatgtacaaaacctttgagtgtatctacttyactcttgccatttatttaaaatattttaaacagtgtaacataatttaattgatatcaccaaacttcartctattccaagaataggaatatggggtttttacagctgcaaaataattgctttttgcaagttggtagtagaattaaatagaattcaatggaaatggaattgtaattaagtatctgcctaacatatataacgtatattaagctaggctcactaaaattttctttcttcagtgtagtttatgtactattaatttcttaacttgcatgctttctcttgagttagctaccttcttatagttgttgttcctaatttatatgtgaaaaactttttctaaatgattaatgaatttatcctgttggtgcttcttgaacctgtagattggggtcttctattagttctaggaaaatctgtggcattagctctgtaaatacatacatatgtatgtgtgtatgtatatatatattttatttttatttttattttttcttttcttctaagactaattgcagcatgttaggccttttagtttccatcttttatccatcctactctctttttcctctgtatacttcagtacttcagtcttggaaatactggttgtcatattttccagttcagcaattttctctttagctgtttctaatcacagtcagaccctctataaagcttttaaaatattagttttgtataacataaaaatcaactttatcaagtttgaagtaatgaaataaaatgaatatattttgagtatacattttaatgaggtttgacaaatgtgtatacccatataactaccactctaatcaaaataatacaacagttttgtttactccaaaaagttgtctggtgcccatctgcagtcaatttttcttcttgtcagccatccccagtcaacaatgatctattttctgacattatagattaattttcccttctagaaatatgttcttgtgtgtctggcttcttttgctcatcatgttttgaagttttggagatttcatccctgttgtatgaaacgaaagtttgtttctttttattgctgagtagtattctgttgtatgactgagctatagtttgcttcagattttttttcaatgtttgactattataaataaacatatgatcattcacatgcaagtcttttgtgtggacacatgggtttttggtttgtttccttttgagtaaatacttaagactaagtatgtatgctaggacatacagtagtgtatatttagctatataaggaactgctaaactgatttccaaaatggttaaaccattcatttgtaatgcccacaagtaatgtgttagagttccagtttagaatctcctcattaacacttggtattgccagtctttttagtttgtatttttctgttgactaataatgttgagcatcttttcatggacttactagtaatttatrtatcttcttctgtgaaatgccctagtctcttgctcatttttcaagttgtattgtttgccttttaatgattgatttgtagaagttctttctctaatctagaagagttttttgtcttacatatgtgttgcaaatattttcttctagattgtgttttgccttttcatgttcttaatggtgacttttgaagaacagaagttcttaattttgataaaacacagtttattggtattttcttttaaggcttagtttctttttctcctaagaaatctttgcatcccgaggtcatgaagatttttctttcatgttttctttaacagattttattaagtcttttttatgttaagtcttttatgtcaagtctgtagtccagtttgagttaatgtgtttgtgtggtgtgcggtaagagttattttgtgtttttttttttttcttttctatatagagaatccgttgtttcagcatgatttgttgaataggctatttttccaccgttgaattactgtgcttcctttgttgaaaagtcagttgactccctatatgttgctttatttatgagctgtcttctgttctgttggtttacatacccaagtctgaataacatagtttttcaattggaagttatgcttcataacacaaagtagctagtttaacttgcaactccaataattgcagaagtcctattatatctatatgtattcttattctagtactgcactgtcttgattactagagctttatgataaatcttgaaattaggtagtgtgagtccttcaactttttagttccacagtttcccacttgattatcagagtatgtctatgtttcacttcttaagaccatactttcctttaattcttggaatttattttctttaagtctttgaaattttttataattgatgctttgaggtctttgctaactaaccctaacacatctgggatatgctgggtatgatttttagtgttttttcttgaccagatcacatttttctttctctctatatgtttaataattttttattcagtagtggacatggtagtcactctgtgatgtttattatcttcctctgaagaatttttattcttgttttagcagatcaccttattgctggtttaaaatcacccttaacttatggaggtttggttttaagctttgttagtgcagatctgtggmaagcccaaggtgtttcccatgtttctttaagattgtctcttctgcagaccttgttttgcctcggttttgggctttattagtattatgtgtctagactagggcttattctaggggacaagttctcaaatgtttagtctctttttgcattcttaaaaattattgagcgttccacagagcttttatgggggtcatgcatattgtattagatattaaaaaaagaagtttaaaaaattatttcatttagcaaatagcaagcttactgcatgttagcatgagtaacattttttgaaaaattgttttccaaaacaaaaaataatcctaagagtggaatcattttacatttatgcaaatgttrttcatatttgacttaattgaagacarcaggattctcttttctgcttgtgtatgcagtcttttctgataggctttttggggttgaaatatctgaagaagatctacatttatagttagaaaagggaagagtatatcaataacctttccaataattgtggatattcttctttgattccacatgcaaactggacaaatggtagtttcttagtggttagctgcaatgtggaatctgaaaccatgtcatgtcagaaaaccttttgcactctgtaacatcacaatccactggtcgtcttacacttgcaaagcatctttgcctatgtacctatgtatgattttgtaatgatttccatttgtcgtatcaaaaatactcgtttcctaagtgaggcctaacttgttaacatgttgtattatmctatataaaataattacatttgttattttatatccatgtcagcagaaaagtctatgaatttgggagccctttataagtactttctaattcttcacagagaatattttaaagaaatctaatggtcaatatttaataaaatgcagtaattttactgctttgtcaggggcattctaatgtgaaacmctccttttttttgactgcatatatgttttatagtgaagaatgtaataatcactaatagatgttgatgacaccgccttgatttgtgttattttagttttaagacagggtttcacattgtcatycaagttggagtgcagtggtgcgatcatggctcactgcagcyttcacctcctgagsctcaagcgatcctcccacctgagccccacgaatagctgggaccacaggtgcgtgccatcacgcctggctcatttttttactttttgaaaagtccaggtctccctatgttgcccaggctggtcttaaactcctaggcttaagcaattcttccacctcagcctcccaaagtgctgggaatataggcatgagacaccatgctcagcttgtgttatcagtagttttttcctctgttgcatcatcagtgcaaatgttaatataatgaaacaaaggaataatatcttaatgttatcataaaaatagttttgactttgtagatcctggctctctgttctaggtcatgctgcttattcataactaacgttgatgctaaggtgcgtcaggtgtgttaacaaggcgatttttttttttaggttctctttactttctcaaggctagaattgcaatttctttcagcactgctctttctctagcaccttgcgacctctactcactttgttgtgctctcagtccctagcagctattgccaaataagcctcaggggttttgtcctgcacaggtacagcccagcccagccatgtgatccctggggactccttcacagacatytggggcctgctctctgcacagatccttcttctctagtttcccatcctgcagactccagccaattcttctgccttgagtttggatttctgtcttctcagttcagtgtaaccaycatgttctgctttgactcttgttgtgtttatgtggttggcaaattgtgttaggcagagagttgggtgattatggtacccatcttgtgagtttctcttctttcagggatcactgtttacaamtgcagctggctactgcctgcagttagttgcttcatctattttctccaatttcataatcggttatgtcagagagggaaagctagtctgataccagttactccattatggctggaaactaaagttttatttaaaattttttcgttatatttttatttctaaaagttctgtttaattcttttatacatttgccctattattttttatagtttcatcttttttagatctttcagcttgtattttattttattaaacacaataagcatggttctttttgtaatacatgtcttgtacctctgatatctgaagtttttatgggtctgttcttgagttgtctatttctgctcgttgyaggttttgcattttagattatttatgtgcctcattatcttggctgtgcactggacattttaccaactgtttatttataggagttactgccaatctggggccaccttaaatcaaattctaggctttagatatcgtagacacccaaagtttccaaccagagctgtaattctgtactaggaccagttcacatctattttatcctcatcctgaggtatcacccttgttgtgtggggaasagtctcgtaatagtccttacttttgggggcctgtgggcttttattgctcttcccctgattccatgagacattgaaatgacagattttatttttcttgatcagtaattgccttcagaacaatgacagcttccatacaygtttaccctctagatttcctttgctcttcagttttcagctggtaattctttaactgtcttgttagctcatagatgattttagaagttgtgtttttgtttttgttttaaatctagttctgttcattgtttacagcctaagggtagatttaaataagctactctgccgttactgaaaacagaaaattgtgccatttraattctaatttaaattcagtaagccatcctatatagggatagcactggttacytgaattttctttttttcttttttttctttttgaagtggagtctcgctctgtcggccaggctggagtgcagtggcacaatctcagctcactgcaagctccacctcccgggttcacgccattctcctgcctcagcctcccgagtagctgggactacaggcgcccgccaccacgcctggctaattttttgtatttttagtagagatggggtttcaccttgttagccagggtggtcttgatctcctgacttcgtgatatgctcacctcagccttccaaagtgctgagattacagacatgagctactgcgcccggccttgaattttcatagttactgttagtggtaaatcaacttcagataatttgaaaaataaaatacattagcttgactacttttatgctataataagtaatgtgtattttggatgaaaagataaaagagtttttaaaaaatctataatatatatatactgtattattacggtataatatatactgtagcatactatatatgatataatgtatactgtataatataatggcatagtttatgccattatataatattataccattttaatatacatgtttgtgtagaagaaatagtgcataaacgcaaggatctatcgtgtttcagtttataaaaatagtttgtctcttaaagctcatgtgtattggtaaagaatcttatacattgaaggctgtactgtagtgaaagtttagtcctttgatatttttctataaaattaaaaattttctttgcttaaaaaattcaacgaacttggtcctttatgtaatcctatttttgaaactcagtctaataaatgtatatctctttattcttaaagcattagatgcttataattttaaagtaaaaacttcctaaaacatcttctgataatttactctaaaaagcttgctacatttttagcttggaaaattcacattgtttctatgtcttgtgtcttttaaaattagttaataatgcctgcagttaaacacaatttattataatagcactttgtaattttctaggaatttaacagaatgagtctttgtatgaatgtagaaatattttgtttttatttgcaataattatgcaaatgcttaacttgaatagttttaaaggatgaaatgaaacaacatagctaaagtaatacctgctgaatttggctccctgtggctgaatgcctgtaccagaaatgggaaaatcgtgtgtccttcttgacatagctcatttgaaaatggtgtttgaattttgtgaccctaccttaattttaactgtcttgttatgccagctgctacattttctccgcccgtcttacctcgaaaggagatgaatagagctgagaygcattagtaaaacaattagaaatcacttactctctggaatttgaggtttaataatgtcccagtggttaaagatagtatagggggctttgtgaatggccatagtacccttgaatttatgtactgaatgttactcagattttagtttccttctttttctttcaaaccttactttgtacattgttggtgtattttgggaactttgcttcaggtatttgtgctactttttaaaaataatatgacactgtatcatcaagcaatgtggtactttttcagaaaaatctgttttatattagtgtgctatcaatgcgtattgattttacaagataaatttctaattttattttgtgttaatagtcacattttatttttctttttaatggctcagaatgttgaaaacaaattttgaagcatccagaattgagtcttagatgacaccactttgagtacagtgtggcattcttgaaaactattgttacctttgcctcatgtatgtgccattcttctggtattagaaaatagtcccacataaatccccatagagaacagtgtgaaggatcagatttgaaggcactttaggatgaaattctatttgagaaattgcttggggaatattgtagtttgggacatttaagaatgtgtctgataaccttcagtgctcctggtctcaacttttagttttgtttgttctttttaaagagttaagataaatgaaaacctttctgttattrtttttttcattttgattcagagggtgggagaagaagagattctatttgaagcagctgttttttatttttattttttgaatattttagatcgtaatgcttcaggtctttggctataactttaaaagcattatcagagatttgagaccgctcctaaaatatgtagagatcaccttatcaagtttagcccctttattttaaaagtcatgagaactgaggcccagagaatttcttgtgtgccctggctcagtgcttctcaaattgtctatggtagagaactgggttttcttttttccccaatgcatgacagatcaataattttgtaaaatataaataaaaagaagtactggagaaggtaattttgaaacaacagacatagttctaaataccttcagtttcagttcttatctcaatgtagatggattgtaaacagttctgggaatcgaattttatataatatgctttgtatagcatagacctgggaatggaactttgtataatatgctttgtatagcacagaccacatttatatagcactgcccagggtcaggggtcagcaaaatggtccgtaggccaaacccagcctatctcttgttttcgtatggcttgcaagctaagaattgtttatatattttttaatggttttttaaaaaatcagaagaagaatattttataaattttataaaatttragtttcaaagtccttaagtaagattttattggaatgcagccatgctcattcatttaaatattatctgtggctgctttcacactataatggtagagtcgagggagggatgaggacccttgaacaatgcaggggttaggaccgttgaacaacgtgcagtttaaaattcgaatgtaactttctcccacaaaattaatagcctactattgaccagaagccttttcgataacataaacagtcaacacttattttgtatgttatatgtattatatattgtattcttatagtaaagcaagctagrgaaaagaaaacatttttaaggaagataaaatgtatttactattcattaagtggaagtggatctccataaagatcttcatcctcatcgtctkcccattgagtgggctgagaaggagggtgaggagtggttgttcttgctgtctcaggggtggcagagacaggcacactcagtgtaacttttactgaaaaaaatctgcatatatgtggactgatgcagttcaaacttgtgttattgtcagctacagttgagacagagaccaaatagtccgtaaagactaaaatatttactatcaggcctactacagaaagagttagctgacccctgccctagagcaaagcatggaattagtcgtcactggtagagttgagagtacacattttaacatgtgctttaaatattatggtgagctgatggggattgtcatgctccctgmccagcacctttgcwtgtcactttatgttctaattcagtcctcctggcaatcttgtaatcttgtatgaaagctggataagtttagacccctgctgatctaatgaggggttagataccttctcctaaaagtcttaactttactgagtttttaatttttaattcatatgtgatgaatgaaatatggttaaatattttctaatgtgaattttgttrtcagcatctggtttagaaagttcagctgcttctttcctgttgctacattactttgctgtagatgtgtctgtgttcaggtctaattaaagaggtaggcatggcccaaacatatttagaaaacatctatttcaagtaaatgtttacttcttttaatgtcacctaaagtacaacaaaactacaactaaactgtaatggcacatttctrttgcaaaatgggcaacatatagtagttaaaatacgggttaaaacaagaaggattgaggttttaggtgactttggagaaacagtcagactttcactattttacttctagcactcattaaaaactacaaaatgaaagctcccatcatttaactgtcaaactcagataaaaatattcatttacttcttgtttaaagcaggttctgcagttcctgaagtatgcagttaaactctgcttttcatggtagctattatttcttctgttttcttcccctttgcatgtgatcactcagcaactaaataaagttagagatagttatcagcttgcatttgatacttgagtctgctttatgataaagaccttttataagccaaatcttcacgttagaatttcttcctggtattaaaaaaacatgttgttacaatagctgtacccattatgatgaaagagtaactacactttgatattgtggcactcgccattttattctactgactcttgaatcagtttataaacatctggaaaacaataatgttcattgtttgcattcacataggaaataacacagaaaggctttgtaagatctcactgcatcttctcaagccatagctggtttttattgtcccaagtctgaaactccccaaaatgtaatgtatgagatgtacaggctcaccttcctggcagctgtgtcctagttctggataaggctgttgtttgtccattataacaaagccattgattttatggctaatacattaaaggaaaaggaagagctttgtaaacagaaggacttacggcttggtaatgtgtgagtattaccttccaaatattgctaaagaatgtatgtgctttagcatggaactgtcatgaatgaatgaaaatttgggactcatcaacggtagtgcctcataacttacaattgaattttacttactggaacaactttttaatacattcattgatttaatcattgtttgggtagtattacagcaacagtctcctcctctcctgccctctccaccctccctacgtatacacaccacataccagatgtggctgataaatgctttggattaatatatctggattttacttaaacagtgattttttcttttgtaggaacctccatatttaagaattcccagtagctactttttacccaatatggcaggcattacattcrtgccttaggatatattatagtgattgagtttctgtttctaaacatttttgatggaaagaatgagtataagaggcagttcctttttgcagctccacgccaggggaccagggttacacacattactatgtctgttaaacttcttggaagccatccagtatgttatggtgagtttcatgtgcaagtggtgagccactaaaaggcttgcacagtattataactattctgaggagaggaggcatttggaaattcagcagtaaagcagcgacagcaacaagcagccacagtggtagtaaagagagggcaggttcacagttagcatatttcacagtgtgagccagcgagcacatagcttcccatactgctgcttgaaggaggcaaaccaaaactctacattgcaagatttttctagtttcatgtttatgatgttaagtcatgtgataatattgtaccataagttgccaacttcatttcactctagagaggctcctttgctgcagtgcttttttgctttttttctttttttttcttgaaagagaaaaaatttgtgcaatgtatgtttatgcctacaccatgccgagacgacannnnnnnnnnnnnnnnnnnngaaacatccggaacactgatgggaaatcagctctggacctggcagatcattcagcaagaagctgtccttacaggtaagaagacagagagctaccgaatgattatatctgtgtaactccttacttgattttataaaatcttgttatgctgaatttttcttttcactgatgaagctaagcaaatatatctgccattatctactactttattattgatttgatatctgtctcattaattgctatgctgtcgtaagcataagcagtaagattgttggtctacttagaatgatagcattaaatcataacatctttcactygtattttagtcatttttatggtttatatcataatttttctgtatctcatcctctcagttgtttaagacctttactgttgagcaagcaagggcatttatattactataaaagtagttttgattggaaagacaacctgctgcctgctgccttatttcttggatcgatagtcaaataaaatatgccgctgcctctcccttgccaccccgtttatactttaatcatatgttttcacttttaccatgatagctaagttatttttaactgaggcgtttattatctttttacttcagataatgcaaatttgtggcttaaatattagttttattaaagcaaatgccaagaaccagcaaagaggaaatgctagaatggaaaaggtctctcataacaatatagaaaatagtgctctaagtgttttcattgatctgcattctcaaaatgctgcattggatctatttttgtttttattcttagcatctgagtcctgctgcctttgccctcttttacttaactgaccttcgtaatgagcctctgtcactgcagtgctaacagtattgttttaggttatgtgaaagtaaatgacttttaactaccttttaaatttgcccatggtcgaagaaaataaatattttgttcttgtttaagtttagagtccatggtgtgaaaatttagcaaaaatactgaggcgaagggaaaacgtttatgtacagaaagctttgaaaatctatggaattttgcttaattactctgcatagaaaaacaactttgcactgtgctaaaattaatataattattgctcagagtaatatgacttttctcaatcaaagattagtgtatttagttgctggataacagtaacatacactagagtaataaacctacttaaattagtgtagataagaaatttaagtataaatatataattttaagtagtgaaattaaaatacatagcctcgggcctgctcagattctacagcctttcagtctcttaacaaagccctgggcaacaatagcagctttagagtggtctctgaccaaaggagaaatacagtgcatagtaacaggggtaggttataaatgctgagcaagactctttgtatatctaaatgtcctccctctgacgtttccttctctccaactctcaacacccgctttgtccatttgttagatacatttaatgcaacaacgcttttagatctactttcacttttttaaaaggcaaaatttaatataagttattaacaagaaactatatcctaatttgtaatgaatttcaggggagattatattggatgttgttagtttgggaaagagctttggaacaatcacttgtggagacacaagattcctggaggacagatatcacatctactaaaattgactttaaagccatctaacactgtactttgcttagataggaatatacgaaattcttggtcataatactgatttagagtcatttgttcttttcaagaatatctctagagtcatttagagttaattgttcttttcaagaatatctacttttttggaaatgatctacagcttttcagatgtgatttaaaaggaaaagtctagtaatatggttaattttgttggaatataaaccagttctgtttctacattcatgctatataatgcagtgaaataacacttaggtgaaatgtattccaaaatgtttttctgcccatacaggttctctaataagtaattctttccagtggaattatggtgaaagaattatttccagagctaaatttaaaagattaaacattaatttttttaaaagggtttcttttgaaaggaatgccttagagttattagagatcattctgagtaatatgtcattctttatttttatgccagatgcaawtgtagtacccttacttaccttgagagtgaaattttccttcttaaatattttttctttaggaatttacttgctgcaaatgtctttccagtatctcatcgttttatgttattacttttgtgcattagtctaaactgtgtacaagtatttatgtgttttccttaaaggcaattaataaagtgacaatctcttttttggtttttttttttttttttttgagatggagttttgctctgttgcccaggctagagttcagtggaacgatctcagctcactgcaacctccgtctcccgggttcaagcgattcttctgcctcagcctcccaagtagctgggactacaggcatgtgccgccacgcctggctaatttttgtatttttagtagagacggggtttcaccatgctggccaggctgatctcgaactcctgacctcaggtgacctgtctgcctgacagtctctttttatagaacatttacaaatatgtgactaataccatcttatacataagaatgcatgttttttaataaagctatacaaagcaacagtgtacccttaattttgcaattaagggaccctagcacatggccattggttttggatagcacacttggatatttaaatgagaagacttactcagagagactcatcatcctctttgctgaattattgtgtaagtgaatggtagacttagaagaaatcttgagggctttcttttgtttttctgctaatgactgaagttctggtcaataaactgaaggacttggaggtatttagatttttcgtttgttcattttttgttttaaataggggtatgaaaagtcaaaaacagcctatgtaaatgttattgaagagcagtttttgtgtgttttgattataaattttttaaagtaacatacttttggccttttctttctgattgtaaaagaaatacattcatttggaaattgagagaaacaggaaaaggatgaaaaagaaaaatcatttgtaattttgctacttagagataacattttgggtgtactttatttataaccttttcttctgtgagcatcccactgtcttatttctctttaatcaaatcagcctaatgtgttataaactgcttaatagtacatatttttctaatttagttacataaatgttcccaaagacattaagtacttttctacaacctgagtttataacaacttcacagtacccttctatgagtatattttggttttttgagcgaattccctagtgtttcacatttaggtaggttgttttcagtctttattcttccctgtgaatttagagtcatttaatcaattctgttggaagtgtgcttcatcacattcagtcttagcatccatggacatggtagatacctctgttcttgactttgaagtaaggaagctttggaaaatgaggagctttcttttttaaaaaggctgcgctgcatgtggtattatgggagagccacatttaagttaaaggtggttgacaaagggaatgtttgttgaaaagggctagaaagtagggtctttgttaattatgtgaaggagattctctgggcagagtggaaaggatagagggagcagtggaaaattgaatcaaagaaagaggtaagagcagattgagcctgagagtttggaaaaggatagataaccaaaggaatgtttgtcgttgtcaggaccaaggatgatggggatgtaaagtgagtgagtttagatggtcacagcattgctaagatggttgatcctagtgttttcctagtgtatttagggttaaggggatgtggaaggaggatatgtttgcattcaggtgtctcaagaataaattagctttaacctggattcattgcacttctgtggaaatccaaatctatgatttgatgggtagcccccagtctctctataaggaatcagctgtggctcaggccaccggcaatattgaggtgtctggtgtgttcttgctgagactggcttagtaagtcagcaaaatgtatccgaaatcctttgctttttttttttttttttcctgctaactgcctcctgctgcccttcagataagaccaacatctttagcrtaaccagtgaggacttaaatgctctgtaccctgaccacctagctttgactactagattttgctgaaaccaaaatttggaactctttccttatttttatttattttttttttttgcgacggagtctcactctgtcgccaggttggagtgcagtggcgctatcttggctcactgcaacctccgcctcccgggtttaagcgattctcctgcctcagcctgccaagtagctgggactataggcaggcgccaccacgcccagctaatttttgtatttttagtatagatggactttcaccactttggccaggatggtctcgatctcctgacctcgtgatccgctgccttggcctcccaaagtgccgggattacaggtgtgagccaccgtgcccggccgggactcctttctttgcctcacactttgtatccaacctatcagtaatnnnnnnnnnnnnnnnnnnnnnnnnnnnnnnnnnnnnnnnnnnnnnnnnnnnnnnnnnnnnnnnnnnnnnnnnnnnnnnnnnnnnnnnnnnnnnnnnnnnnnnnnnnnnnnnnnnnnnnnnnnnnnnnnnnnnnnnnnnnnnnnnnnnnnnnnnnnnnnnnnnnnnnnnnnnnnnnnnnnnnnnnnnnnnnnnnnnnnnnnnnnnnnnnnnnnnnnnnnnnnnnnnnnnnnnnnnnnnnnnnnnnnnnnnnnnnnnnnnnnnnnnnnnnnnnnnnnnnnnnnnnnnnnnnnnnnnnnnnnnnnnnnnnnnnnnnnnnnnnnnnnnnnnnnnnnnnnnnnnnnnnnnnnnnnnnnnnnnnnnnnnnnnnnnnnnnnnnnnnnnnnnnnnnnnnnnnnnnnnnnnnnnnnnnnnnnnnnnnnnnnnnnnnnnnnnnnnnnnnnnnnnnnnnnnnnnnnnnnnnnnnnnnnnnnnnnnnnnnnnnnnnnnnnnnnnnnnnnnnnnnnnnnnnnnnnnnnnnnnnnnnnnnnnnnnnnnnnnnnnnnnnnnnnnnnnnnnnnnnnnnnnnnnnnnnnnnnnnnnnnnnnnnnnnnnnnnnnnnnnnnnnnnnnnnnnnnnnnnnnnnnnnnnnnnnnnnnnnnnnnnnnnnnnnnnnnnnnnnnnnnnnnnnnnnnnnnnnnnnnnnnnnnnnnnnnnnnnnnnnnnnnnnnnnnnnnnnnnnnnnnnnnnnnnnnnnnnnnnnttttaattggtaagatggatgaggtttactgagtttttatcaacagatttctcagatggctcttatgattgagaacattcccaattctggaaagatgaagctgcctgcagctgtcacatcagacatccagatgtcaaaccgaggccttatttttgctttttttttttttttgagacggagtttcactcttgttgcccaggctggagtacaatggtgcagtctcggctcactgcaacctccacctcctgggttcaagcgattctcctgcctctcagtctcccaagtagctgggattacaggcatgtgccaccacgctcagctaattttgtatttttagtagagatggggtttcactatgttggtcaggctagtctcgaactcctgacctcaggtgatccacccacctcagcctccgtaagtgctggaattacaggcttatttttgtttttttcttttggccattgttytgttagtttgctgttttgcacattagctatactrtaacctggcatattgcataccatgtgtaatacatgttttactgtcagactatatgattatttttctcatgctgttaatctgaacttaaagaattacttatcagttattagaaagtctaattatacagactgcatcctagaaaataaactacaagcagaaataaatcttaccttacttattaagaaaagttgtatatttatctatatgaattttattaggggaagttatttttataataagatgaatttctgattttaaaagattgcctttagtattacagcaaaggaagttaaaaggcattactgctgaaacaaagcaatgtgaatactcattttaaatatatgttaaaaagttaatttcttgactaagaaaattatatgaatagtttaatcttgtataattttggacatgagcaggaaaatttaaagttttatattgaacgtggttgaaagacttttttgaaatttttaaaatatgaagacaatttaggagaagaatgtaaaactcacaccttttaaaaaagattatatctgacgtaagagattaatttcaattttcaagtgttgtttgcaccgtgaaggaacagctaagctagtttctttcttttttcttttattagcagcaggtatttgtttcatagttcatactgaatgtttagattcttgcagcaagcaaacaacttagcgttacataaaatacagtgacaataataatagctgacaccgcctgaatcctcctttgatccaggtgctatttcaagggcgttgaatcctcacaatgaagctgtgaagtagatattgttattgtactcatttttacagatggagaggttaagttacttctaagttcacagaaccatcaagggaaattacaggaatttgaattcaagcagtttggctccaggatcaatgagtgctcttatatgtgcagaatcagactttttacctgtttgttcatttggaaggacatggcatggcctaaaacaaaaataaaattagagtggcccctaaatataaactccagggcttaaatctagtctgttaatataatgttcttttttagattaaagattattccttttgaaagacaagttacctaatattgccagtaagactcatcatcatattattataataaaatggattaacttggtaataaattgattctttgaactttgcatagtaaccttcccttatctgtggggatacgttccaagacccccagtggatacctgaaaccacagatagtactgaamcctgtacagactatggtttttcctatatgtacatacctgtaataaagtttaattcataaattaggcacagtaagagattaacaaccataccaataataaaatagaacagttataatgatgaactgtaatgagagttatgtcaatgtggtctctctctgtgtctcacaatatctaattgtactgtattcacctattttcagactgtggttgacygggggtaactgaaaccacagaaagggaaactgcagataatggggaatatcataaacgatcttcttcagtctttgctctctagtcactagggttgatgaacattcatttgaaacctaaaacaactagactctgtatggaaagatgtagtatttaaggtgtttgatctattgataggtaagaggtagatcaaataatgtcaatagaccttaagttagttatagatactaacctgtgtacaggcatacctcagagttagtgcagattyggtttcagaccactatgaagaagcaaatattgccataaagtgaaacacactttttttttttttttggtttcctagtgcttttgaaagttgtgttcgtactatatagtgtgcagtagcattatgtctaaaaaaagtactaccttaattaaaaatactttattgctaagaaatgctaacgaagtgagcacatgctgttagaaaaatggtgccaatagacttgctggatgcaaggttgccacaaaccttcaatttgtaaaaaatgtatatctgcaaagtgcaataaaatgaggtatgttgtttatggagtgggagggaatagaaactaactttctgggctgggtgctgtggctcatgcctgtaatctcagcactttgggaggccaaggcaggcagatcacttgaggccaggagttcaagaccagcctggccaacatggtgaaaccccgtctctaccaaaaatacaaaatttagctgggcgtggtggtgggcgcctgtaatcccagccactccggagggtgaggctggagaattgcttgaacccgggaggcagaagttgcagtgaaccgagatcatgccactgtactccagtctgggtgacagagcaagagacatcgtctcaagaaaaaaggaaaaacaacaacaacaacaacaacaaaaaacaactaactttctgtttggataatctcaccactctagtacttcaagtccttccaatgaatctttttgtgtaattaaagccaccaggcttacatcattaaaaaaagtgacatatttgtgaagcatgataacttsttagtgtatactctgagagcagctgtcattttccctagtaaattatagcaactctgtaacatttgtattgcaatttggattagaacttcagctacaaccaaattggtattttaaatggttctttaaaatataataaattactgttaatatttgctttcttaaagtagcacatgtaacattagaattcattaatgctttgctattgtaatggttactagctctgttctttaagatttttattaaacttttattttgacataattgtaagttcccatgcaattgttagaagtaataaaaagaagtcccttgtacccttttcctagtttcccctagtggtaacaccttgcagaactgtagtgtaacatcacagccaggatattgacattgatgcagtcaagatatgggacatttctgtcatagaaatacatacatactgttttgtacttttctctacttataatacctttaactagtttttttaattagggtaaacctggccttatagaatgagttagttttccttttattttctggaagagactgtaatgtgttagtaatacattyggccctaggtgtcctcaggggtactggttccaggatcccctgaagatgcagatgttcaaatcccttataaaaagttacatagtataacctatggaggcatatcctcccgtatactttaaatcagctttagttataataactaatacaaagtcagtgctgtataagtagttttgttatactatattttatttgtattattattattrctatttaaatctgtagttgcttgaatccataaatgcagaacccacagatacatagggccaactgtatttctccttaaatgtttggtagaattcactagtgaaaccatttgggcctaatcatttcattattattattatttgattcaattttaagtaggtctgaaactaattgggttatttatttcttcttgtgtgagtcttagttatttatgtctttcaaggaattggtcaatttcatctaagttgtcaaatttgtgcatagagttgtttttagtttctttttatcagatatttggtgcctgcagggtctgtagtaataatcccgtttcattcctgatattggtaatttgtgttttctccttttctttgtcaattttattgatcttttcaaataaccatttctttatttcattattcaaattctttttctgttttcaatattgttgatttttgttttttattatttccttttttctgcttattttgggctcattttgctctttttctgggtttttgaggtaggagcttagaaaattgaccttttttcccctttttcctaatgtatgtatttaatgttataatttttcttttaagtactgcttttgctgtgattcgcacattttgatttgttccattttcatgttcattcagttaaattttgtatgtttttaaatttctcttgagatttcgtctttaacccacagactatttagagtatggttgtttagattctgtttggagatttttctgctacctttctcatgttactttctagtttgattccattgtgcttgaacaatactctgtatgatttcaatttttttgatttttaaatctttatttggacaaaggtaggacaaagttcatggctcaggacatggactatttttgtaaatgttccatgggcatgtgaagagaatgtattttctgatgtttttggatggagtgttctataaatgcctgttattaatagattctgttggttgatggtatcattgagttctatatccttgctgattttctgtctggttgttctatcagttgttgagtagtgaagtttctaactataattgtagatttaattatttctcctttaacttctatcagtttttgtttcatatattttgtagctttgttgtttgtagctttgttgcatacacatttaggattgttataaatgtgattgaccctttcttcattttataaaaactctttcataattttctttgctctaaattccactttatatgatgttaacatagccactcctgcctttttaaaattgagatttgtgtgacacagatttttcgattcttttactttcaacctgccaatatcattatatttgaactgaattccttttagatggcatattagttgagtcattttttctcatccatgctgacaatttgtttttgaattggtatacttaggcgctgtgagatttatggcaaattcctcacatctagaactgtaaggtaataaatgtgtgttgttttagctactaagtttatgataatttattgcagtagcaataggaaactagtacagtatctattggttgtcttttttattcagtttgagatcttcatagttcttggtatgacaagtgattttctgttgaaacctaggcatgttgagtattatgctgtaagaccctggatcttatgtgaatttgttttagctggcttaatttgacgcactcatgcaggagaattgtgggggttggggaaggacactgccaccttacagtcagttgtgggtagaagtctaggttccctatctggtcacttttgacacccatgagggagtttttaattattgctgcctctcctgtcagtgtacttgcttgggaatgctatagtatttattaatcgcaatggctatactataaaatgtgtttttggtcttcaaccagtttcctggcatacaattcctaaaaatatttagaatcttcgaagtcatgtctttttgtatgctaatgagtttactgatgcctggcagtctccaggtagcttcaggatggaggctggtcattggatagaccagagcataattagagggttggactttcagcccaaccactgaggaagggagagnnnnnnnnnnnnnnnnnnnntgcctatgtaatgaagcctccatgaagactcacagagtttggagagcttccagagagctgaacatgtggaggttcctggcagctggtgccccaggggtggcatggaagcgcctctcccccttcccatcccttgccatatgcatctctttatctgtattctttataaatgctttataataaaccagtaaatgtaagtaagtaagtgtttttctgatttctgtgagccactctagcaaataaattaaacccaaagaggaggtcatgggaaccccaatttatagctggtcagtcagaagcacaggtaaaacaacttgggatgtgtaattggcatcagaaatggcaggtagtctttgtgggactgagccctcaacttgtggcatctaatgctgtctccaggtagtgtcaggactgatttggaggccatcctgctgttgcctgtggcaaaabttgcttgcttgcttgcttgcttgcttgcttgcttgcttgcttgcttggtgtttggggaaaactccccacacattcagtcacagaaatcttctgtgttgattgtggtggtgccagagcagaggcaaaactgtttgtttgtgtttttccactcactgtttggcctattttgttgccgtaatcaagaaatgaatgtagccggaaaaaagaaaaatacatgtgtaattgtcagatttcactttataatcataaccataaatctcaagtgtgtttttatccttgcctcagccatttctttttacacatttaattttttcctctcagcttattacttttttcatatttcattgaaaaaatagatgccatcaaaaagaacttattgctatcaccaattctaccaacttagctgcagctgcactcgtgtacaatgctttccttcttcattcaatggagaaacatcctgcttctttctaaggccacctctcgtctactttttgctctggatttcattccatctcaccttctcaggaatttgtttcctgcagctatgctctgcttactggtttatatccatctgctcatatgtattgaattctggtagctcacatcttttacaacaataaaataaaaaaaacacattcttttgtgtcaattcttacaccactctttagtcacttgtttttctgcttccctttagagtatacggaactgcccatggttgctcactactttcttactttttagtctgaactaaactcacctggtactgttttcatccctaacgactgtactaaaatgcctttttgctattgttattgtttgtttttttctccctgagttttttaagaaactctgtcttgcatatccgttggccactttctcgtggagcctctcagcagcattcaacaaaatttattacaacttccttttttaaatggtcttctaatgacttgcaaggtacaaattcctcctgcttttttttttctctcatttcatcgatagatctttctcatgatgattctttctcttctgctccacatccagctatgagaaaggcccaggttaagtcctaggatttttactcctccccatctaactttggggtgatttcatcgagtccattttaaatggcatctatgtgctaaagacccctctcgttcagacctcctaccttccagtttatagctctagtgttgctctgccctcttcagaggtacatatcctactrcctacttgacatttccaaatgagttgtctggatgtctcaaccttaacatggccaacacagaattctttatctccctatccaaccctattgccatgcccaccaaacttgaaccccattctttccctctcgggaaatattaccacaagctacccggttgctccagccaaaaacctacaagtcggrctttattcttctcttgttgtcttaccttgtgttcagttcatcatccagttttgttggttttacctccaaaatctattccaaatccatttttcttagttgttgtaactgccagcaaacattctgatttatactaggtctcaccaacgtgtagtctgtaggctggtttcaatgacctgtttgtttctggcctgcaatgaggtaaggggctggcactagaatataaatcaatggtatcactaagcacacctttagtttacttgacttctttttctaatagcaagacttccttgttgaaaaagcagtacattctgatgcagactcctaatcttgccgaggagtgacattgcagcccagctgtagactaatagctgatagccctctgactgctgtacgtcaggcttccttaagtctgttctctacatagcagacagaaactttttaaaaatgttaactagtttatttcattcacccccttaaaaatcttttcacttggaaaaacattcagacttttaatctggcccctatctacctgtctgactgcaatggttagtgcttttcctgttgctcctgtattccagccatagttgcctccttgctgttactcaagttggtttctctcttgggttctttttctacctttcttctcttcccagtttgctggttgctttgtttgaaatgttcttttcctcaaatttttgcttaactactttctctttttggttttgtttgtttgcttgtttgttttttgagacgaagtctcgctctgtcgcccaggctggagtgcagtggtgtcatctcggctcactgcaacctccgcctccccggttcatgccattctcctgcctcagcctcctgagtagctgggactacaggcacccaccaccatgcctggctaattttttgtatttttagtagagacggggtttcaccgtgttagccargatggtctcgatctcctgaccttgtgatccgcccgcctcggcctcccaaagtgctgggattacagrcatgagccaccgtgtccggccaactactttctcttaatatttaggtctcagcctaaaaatcaccactgctaataagctcttcctgacctctcatatgggctagtatctagtccagccaccagtcaccctgtatatcccgtgtctcccactgtctgcagtgatttcatttacttactgttttgtttattcatgacctgattcccacccctgactttcagtactggcttcataacaagtcgatttttttctcctttgttcattgttatggttcccgcactcaataaatatttgttaaatgaatgatcattccgccagtgggtgcttcatagactagcactgttayattatagcagcacaacatggtaaaatcaaaacagcataccagcagtataaaatgtacaagaaatattagggaggcaagctggaattgacaatgagaagatttgaaaagggacctttgataagttgtcttgtctggtggttggtttgtttgttaaatctgtgttggtctgtgggtctcagaatctgcaagttctactttcagctgctcttaaataaactaacagacttactcttcaaataattagatagttacaaaaaaccccagcaaatccccatcacattaatggggggaaaacacttcttatttataaattcatgctatataaaatttcctataatagagtatgcaatgtctggcccatactagtactccaataatagcctttgttattgaagaaaaattacagagaatcacttgtttgcagactgcattcagaattgtcattaggtttctgtagtctaggcagaatcatcgtaaatgaatgaaataacatatcaagaaagagattctaaaacttttctattcaattgacatttattgattgccttatgctctagaaacattctcagatctttaaaaaaattaaataattttatccagaaattctttactatatctaatgtaaagcctcctttttactgtattttctccttgacgaagcagtacatacattttcatgaccttttctaaaatcttcattcatttatagaatacctttattaatttgcttagttttaaacaaaacaagtctcaattctctcacaaggctgcttttttaaactagatattcttggctamgtattagaagcctcatatctacaaatgtactgatttcaaatatctcatctaaccgttaactagttcataaagtagtttttataacattatgattataataccccaaatctttacatagctagaatcctcctgtgcttctgaaggacatcaaaagggatgtgatcttctcacrtacccagccatgtcaatcatgagccattttagggtgtgtaggctggacaacagattaagaactatctaagtcttagaataatcctgctccattgagttatgatttttgtgagtatactttcacatcatgcttataagtcataaaatgtactgatgaaaaagaagccattggtaattattctataaaataagttatctagtgtagtagaagaaaatttactaaaaactaaactaatttggcattctrtcattttgataaacactcttgtctctatttggtagacttagttatcacaatcaaatttgtcttctgctttagaatatagggagatcatctcattcattctagtctacacaattttaagttttatatttgtgagcctatttgtgtttaatttttccaactctttttttgactttccatcttatttcttcagtcgtaagtcttttccaaaataacgctgcaacaaaatctgacatggttggttgattttttttttttttcaagaaaaagtgtcaagtttttaagaatttcaacatgaatccagcaacagaatgcagatatagctaagaaatggcagctgagatggcagtgatacatgctttaatggtttactcatttacaaaccgtatgrggaaagaggagattaacattggctggtatcttcaaaagtaatcagattcttcattaaaatcaaattcttcattaaaacctttgacaaagctttcagcagagtattaatggcagttttatttgttattgttgtttgtattccctgaaagcttaatgatattaaaagctgaaacttataattagacctttgataagtagaaagatgccagacttcatgtattaaaatacaaagaagtttttacttctgtttaattcaaattcaactgcagtttttgcctcaaagttgtactttaaaccactaagtcagttgagctatttgaattttatgagtcatatgtcattgctaatgtcaagcttccctacgactgtttctccaaatttttattatttgtattttgaaaaatttccaacttacaggaaagttttaaaaaatactaagatgaatacctgtatactctcgcatagattcaccaattattaacgtatttcagggtgtatttcttattcttttccctctatatattttttcttctcagcaattaagcattaatacaatactactatttattggacaattcatcttcttaccgtttcatgaaaaatttcttcgcttttgacctttcccatcaatactaggtaactctttctttcagctgcttttgagctgcttgaaccctatcagagacacttagaaattggtatagcatttcacctctacttagctgtcacctcttttctacaggtgcatttcaatatctactgaaacatttgcttgttttcttttacttcttttacttttggtttaatgatgttactactctatattgttctttccttttttgagatggagtctcactctgtcgcccaggctggagtgcagtggcgtgatctcagctcgctgcaagctccgcctcccgggttcataccattctcctgcctcagcctcccgagtagctgggactacaggcgcctgccaccacgcccggctaattttttgtatttttagtagagatggggtttcaccatgttagccaggatggtctcaatctcctgacctcgtgatctgcccgcctcggccacccaaagtgctggaattacaggcatgagccaccgcacccggccctctatgttgttctttgcagagatagttgaatacaagttttggcattatggaaaatggtacattactgcttacattaggcactgaagaaatgcatggtgaaagtgttttaaaagttaaattaagattttttactcttccttccaaaaatgtactactaaccttctcagaggagtttaattcataggtgatccggaactggattttctaagtttacgattttcaacaataaaaatatataagtaataggttattcattgtttgtaattgcaaaatattggagcctgcctaagtgcccaaatataggagactggttgaataatctgtacaaatacacaatagagtattttacatctgtacaatagtgaagttctctagaactactgatggattactttctaagatacattgtttagtgaaacaaagtacaaaagattgtttacaatatgccatcctttttgtcagaaacaataagtgataaccagcctccaagaaggtgcccaatcaacctgtctcctagtattcacgtttgtatagtcccctcccacattgtagaagagtttttctgtgtgaccactagcatatggcagagctgatgataagccattttcaagatggtcataaaaactatggcttttatgttgggctgtttttctcattcacttggatcacttgctccggaagcagcaaactgccatattgtaaactgccttatagacaagcccatttggggaggtactgaagtctctggccagtagccagtgagaaactgaggcttgtcaataaccacatgaagattcttggaagcagattttccagccgcatttaagccttgagatgagatatgatagtccccatgtatagcttggcagcaaccttgttggaaatgctgagtcagaatcatccagctaaccattcccagattcctgaccctcagaaactatgtgaaataacattcattcttttaagttgtcatttccagatgtaatttgctaggcagaaatagattactaatacactataggaattaaggaaaaaaaactcatttaactgcatatatatatatatatatatatgtatatatattttttttccaaaaataagcacaagaaggataaaccagaaaacattgaaattgattacctataagaacgtgagaacagagggtagataagacattaagtagaccatgccattttggtataattttaatttctggaggcatgttaatgtgctacatattaaaaaataaaattaaattgaagatgggggaaaaacacctaaaatttgaatgtaagcagaaataaatgagccacctatatttcaaacaaccacactgaagaaagtaaagaactaatctaagtaacttttgaacgtaattctttgacttcatattcttggtgtaggaggaaagaaaagggaatttcaaaccaactttgacttcttattaagtttgttgttctttgttttttgcagtgtgtggtgtagtaattctgcaactattttatgtatgttgtaggattmagcaaataagtaaatgtgttgggagcaagggctcttactgtagaagaagaagatacaaatgtggaagggggaagacagaggagaaacttgtggatttggattgaagttgtaggcatcagaatcactgcgggaaacaaacctctatttctgctacagaaaagacctagaagcagtgagaccccaatagcagtggagcacacctgcttccaagagcttggtttctacatgccgtttattaaaagacaccaaaactttgaaaaaaaaatgactgatctcaaagctaggtcggggaaggtgtaaaaggagcctggaacatcttctgtgctagaaagtaatgaactgctcggccgggcgcggtggctcackcctgtaatcccggcactttgggaggcygaggctggtggatcacgaggtcaggagatcgagaccacggtgaaaccccgtctctactaaaaatacaaaaaaaaatattagccgggcgcggtggcaggcgcctgtaggcgcggccactcgggaggctgaggccggagactggcgtaaacccgggaggcggagcttgcagtgagccgagaccgcgccactgcactccagcctggacgacagagcgagactccgtctcggggaaaaaaaaaaaaaaaaagtaatgaactgctcaaagaaataatggagacacatgaaaagaacataggaaccatcctgaaggggctcccaatgaacatatccgggatagtttgactatcaaagtgtatcataatagtgatggattgtatagcccattgtatgaaataggaattcttcagtggtaatacatgaacgaatggggagggacactttcttactgtagaatgcctactaatcaatgtggagggastgttggaattggaaaatcaccatttgcaaccatgatagtaaagactggttaggacaacaatcgttagtggatgccaaatctcaggggcaaagtttgatgagcagctgtataattatatgattctcagcatgattgctcatagattgataattacttgggagaaactatacattgacaaaatctgacaatacttttttyggatatcaaaattaacatcactaatgagaatgaattaagcctgtgtgctggcagatgtaatacctgagaaggtcacaacatttcttatgttgtattctggctagggaggcatgactaaatctcatgagaaaacattaaacaaattccaatttaggttcattctacgaaatagcctgtatttttaaaaaatgtcagtgtcttgaaagacaaaggctgaggaattactccaaatcaaaggaaactaaagagacatgacaactaaatgcaaaatatatgatcctggactagaggagaaaaatgctataaaggctataataggaatgactgacaaaattggagcacatactgtatattagatgaaaagtattgtaccagtgttacttgaatttaattactgtactgtggttacatgaaaaaagtattgtttttaaaaaataggcactgaagtactaaacgcaaggagaaataatgtatcgatgtattgcagccttctcaaatggataaaaaattggttgttacatatacctatgtgcataaacataagcgagaggatataaagcacatgggcagaygattataagtaggtgagatggaggatatggaggagccccttgtactaattttgcaaattttctgtttgaagttatttcaagtaaaatgttattcaaagtgatcatgctgggcataagaaagaaaaaggaaaactgattgatgttaataagttatgtggtcatgccatctatactagcttttctggttttctgaccttagacagcctcttttttgaattattagtgyttataaagagctcaagactttttttttctttttctttacattttacttctaactgcattgatggtcttttctattgattattgtttcaaaattaaatgtctttttttctatgaataaagttaaaagttcccaggcctcatttcagatcagagcattttatgggcattgttataattgttaactctccttgctttctatcttgttctgaagaaaactcttgggcattacatccagtgaggctgttttgaagcaaatgatatctgtgtcattttgtcttgycttttccataagatgacaatagattcagtgttcctaattggtcaagagtgctttcacttcactctttgagaatacgttacgttagatggacaccagatgagtactaactagttcccagaaagcttattagccaaattagccttcttagctttgtatatatgactgcaatatgtaagtaatcactactttctcttctttgggaaaacatcaggcctacttagaatgtcagtaatttagagtaccttaatattgtatgtttgatcattagcctcttgacagttttaaaattgctagacctttattgatgtggatgttggaaatcatctgaattgacagcttgagtggacatgcagaagaatacagtgaagaatatgctcaaatttttttgaatgaaagtggaaactgcataattatctcaaatgactatgagttatcgttctagatatgggaatttctcttaaaagaagtaatatttgggaaattaattagacaggaaatcagtcctagataaggaatgcttttcaaktgtagactgtccattgatttgtggattatcagaactttgttattgcctgtgagtatcatgttgtttttctttctgacgatacagactggttctgtgtaccagttttggtttccgttccttccttcaggttctttctttgtggggaaacattgctctttataattctagttatatatatttggctccagtatttgaaaatgggccccaggtgaataaaaaatactcttttttctctattggtgttataatctttccatatgttgttgttttttattattctattacccttttaatgcactgagagtgaatgataaattgcttatgatgggacataaaaatgactcttgttttgaagaagttattagaatgccagtggcaatgacagacagcaatgggacagtatccttttctccaggagagcaacaaattttgtgaatttgtttacaaaataagtcttcttattttaaaaacctaataagggaaagtaaaatgctcatttgcttatactctttgtaaaagaaaaacaaaaacacatgaagtagaaatattaatgatgctttataggagagaaatctagccaggaataaagaagggaaagaaactcaattaagaatgcaagcaatgtttaaaccactttatatgtactactatcaccaaaagtttgtgattttatttactcctttttcttaaggttatactttaatgtgtgcccttctgaatatttgaactctttttattattattatttacttatacattttctagagatgggatctcgctttgttgcccaggctggagtgtaccggcatgatcatagctcactgcagcctcaaacttctgggcccaaggtatcctcccacctcagcctcccaaacccaagtagctaagactatgggcgtacgccactataactagctaacttttttattctttgtagagctagggtcttgctatgttgcttaagctagtctcaaactcctggctttaagagatcctatcaccgcagcctcctaaagcgttgggattacagatayaaggtgctgcctccagcctraattcttatatttccctgtgtttgccttaatcatggcttccatgtcaatgttacttactttctcattagttaaagtataccttgggccaaatgttatggtgaaatgttgtgaatgctactttgaattatggctggttttggaactaaaaatcttctgttttctggagaagaaaacagctatgcccatgcagctgcatccatatatacctacatgtgtatacatacattttacctactttttttctagatccaaggagataattttgaatgacagtttatatactttgtttctgaaagaaaagagaataggagaaattattctaagtttattwtgctttaaatatttatgtcattcttttcagacaaaaatgattaggaaaaagttgaaatgatattttaaaacataatttaaccaaagagtggaagtaaagatagtttcccttaagaaatttttgaaaaatgtgaggtagaaaattattttaaatgtgtgaaaagccataagatccaaaaggagactggtatcttatttataatggaaaaaaaataggatgaggatgaatacaaagctctrcaggagaastgagtgtatatctatttttcaaattggtgcccaaatgacagggcaaaagaacctaaaagagtgaatgattccaagaactttctataccttaattaaaaagagatggaagtgaggatgggggtgtcttgaaaattgtattaacagagttttccctcaaaacaaattattgtctaacctacttctgttattaaattaactttcttcctgtgaaccttgacttgaaaagtatttagacttttatcatcatactctgccaataggtttgctattgtccagtagtgtgatataattgaatctgaatattttctatgttattcagagcaaataacagtactaccttgtaaattcttgaagcttaagaattcaggaaaactcgtttattttttaaagtagacctatctttaattggaatgaaaaccaattaagctttgaaggaatgcacatttacaaactgtcagttgtttaaacataaggagagtagcttatgaacagtttattgccaggatgtaagagtggctttcttttgattttgaccactcatttctctgtgggctaaaaaatgaaacatttattttttattgaaatgaaaaaataaatatggtcactttaaaatgtatacatagataattttgttttcactatataatcttgtttatctaagccttttttttttttggctttctggtttttcctgagtagctttcaatcttgtatcttttcattatgtaagagactgtaaaatatatttactatgttttagatatttattgtagttcagtaacttttgtatttatccctgacttaattaaataaacttaattttaactactgaggctattcctcagcaactgtgatgagttcttgttatcttaggggattctggtttgtgctataagtgtattagggtgaaagggttagttgaaaagtgtggggaagcaaaagggcttctttgagtatttgcagctctattagactctttcattcactttcctttaaaacacatatatttctacatatatcttccagtaaattgtgtgaagcttatgttccaaaagactaatcgggacggttcaagaacagtgggaattgtgcttttacttactcaacgaaggataattgtagaaaagcatcgtgggctgctataaatcttttccactatgtgtgaactctttagctaaaaagtgcctatacagggaatatatcaaggggtctttctggcaattttgatagtctcatatcttgattataccaaagttagggtttccttaaataaggaaatccattttgtgttgctgtaacagtataccatagactgggtgatttataaagaaaagaatttttatttctcacaatttctcacaaatttggaggctgggaagtccaatatcaaggagccagcatctggccagggccttcttgctgtgttattccacggcagagggcaagacagaaaaatggcattaatccattcatgagggtggagccctcaggacctaatcacctcttaaaggtcccgcctctcaaaactattgcattggggattaagtttccaacatacaaacttggagggacacattcaatccatagcagctactattaaaaacaacaaccaccaccaccaccatagaaaataagtattggcaaggatgaggtgaaattgggccccttgagcactgttggtgggattgtaaaatggtgtaagcactatggaaaacagtatgaagactcctcaaaaaattaaaaatagaattcccatatgacccggcaattctgcttctgggtatatgctcaaaagaactggaagcaggggcttgaagtgatatttgtacactcatnnnnnnnnnnnnnnnnnnnnnnnnnnnnnnnnnnnnnnnnnnnnnnnnnnnnnnnnnnnnnnnnnnnnnnnnnnnnnnnnnnnnnnnnnnnnnnnnnnnnnnnnnnnnnnnnnnnnnnnnnnnnnnnnnnnnnnnnnnnnnnnnnnnnnnnnnnnnnnnnnnnnnnnnnnnnnnnnnnnnnnnnnnnnnnnnnnnnnnnnnnnnnnnnnnnnnnnnnnnnnnnnnnnnnnnnnnnnnnnnnnnnnnnnnnnnnnnnnnnnnnnnnnnnnnnnnnnnnnnnnnnnnnnnnnnnnnnnnnnnnnnnnnnnnnnnnnnnnnnnnnnnnnnnnnnnnnnnnnnnnnnnnnnnnnnnnnnnnnnnnnnnnnnnnnnnnnnnnnnnnnnnnnnnnnnnnnnnnnnnnnnnnnnnnnnnnnnnnnnnnnnnnnnnnnnnnnnnnnnnnnnnnnnnnnnnnnnnnnnnnnnnnnnnnnnnnnnnnnnnnnnnnnnnnnnnnnnnnnnnnnnnnnnnnnnnnnnnnnnnnnnnnnnnnnnnnnnnnnnnnnnnnnnnnnnnnnnnnnnnnnnnnnnnnnnnnnnnnnnnnnnnnnnnnnnnnnnnnnnnnnnnnnnnnnnnnnnnnnnnnnnnnnnnnnnnnnnnnnnnnnnnnnnnnnnnnnnnnnnnnnnnnnnnnnnnnnnnnnnnnnnnnnnnnnnnnnnnnnnnnnnnnnnnnnnnnnnnnnnnnnnnnnnnnnnnnnnnnnnnnnnnnnnnnnnnnnnnnnnnnnnnnnnnnnnnnnnnnnnnnnnnnnnnnnnnnnnnnnnnnnnnnnnnnnnnnnnnnnnnnnnnnnnnnnnnnnnnnnnnnnnnnnnnnnnnnnnnnnnnnnnnnnnnnnnnnnnnnnnnnnnnnnnnnnnnnnnnnnnnnnnnnnnnnnnnnnnnnnnnnnnnnnnnnnnnnnnnnnnnnnnnnnnnnnnnnnnnnnnnnnnnnnnnnnnnnnnnnnnnnnnnnnnnnnnnnnnnnnnnnnnnnnnnnnnnnnnnnnnnnnnnnnnnnnnnnnnnnnnnnnnnnnnnnnnnnnnnnnnnnnnnnnnnnnnnnnnnnnnnnnnnnnnnnnnnnnnnnnnnnnnnnnnnnnnnnnnnnnnnnnnnnnnnnnnnnnnnnnnnnnnnnnnnnnnnnnnnnnnnnnnnnnnnnnnnnnnnnnnnnnnnnnnnnnnnnnnnnnnnnnnnnnnnnnnnnnnnnnnnnnnnnnnnnnnnnnnnnnnnnnnnnnnnnnnnnnnnnnnnnnnnnnnnnnnnnnnnnnnnnnnnnnnnnnnnnnnnnnnnnnnnnnnnnnnnnnnnnnnnnnnnnnnnnnnnnnnnnnnnnnnnnnnnnnnnnnnnnnnnnnnnnnnnnnnnnnnnnnnnnnnnnnnnnnnnnnnnnnnnnnnnnnnnnnnnnnnnnnnnnnnnnnnnnnnnnnnnnnnnnnnnnnnnnnnnnnnnnnnnnnnnnnnnnnnnnnnnnnnnnnnnnnnnnnnnnnnnnnnnnnnnnnnnnnnnnnnnnnnnnnnnnnnnnnnnnnnnnnnnnnnnnnncccattcatactggaaatggtgtgaattcacccacagtggtcagagttttcaaagaccatgctgcacagagaatgttagtaaacagttttatgcaaggaaaaggcaggaaaggagttgtctgcatagtctgaagggataaagacacacaaacaggacgaacctcagaacaattttaacagaaagagacacgagccccatactctcactctgacgtctaaatttacctgggtggagagagtgaggcgaggattttaaaagatttgcagggacctcagattccaggtatattagtgctgggggactatgaagcacatacttaatctaggtagaggggaaacaggcatcatggtctaaatgtattttcaacttaaaatatttccagtttacaatgagattattaggacatagccccatcataagttgaggatcctctgtgtttgatcttattcctgtcattttaactttttctttagtattttttgaaacttactttgatgatttaaacaagtttctttcttgtgttttcccttcctgaaagttctgtttttgaaaatacagttttgactcatagttatcttttctttaacagccatatttaaattcacattgtttctctgatttggcaaaataaaataactgtgttcccaagacgtttacttactatttctccattgycctaccctcaacccttctcagttcttcaatttctcatagttgaggattttagttctagactagtagtatattatatctcttcattttagaaattcctgcttaacacataatttccttctgcattatcattatccatttgggcttacttgtatattgcaaacatttattgcttgcttgcttacttacattgcttgcattcttggtcttctcttgctcttgagatttctttttttatagtattttaaaaagatttccttgtttttttcagatagaatatatgaatgttatttttttcgcttagttcttgcatgtctttctttggcctccaaacgaataatgccttacctgcaatatattaaatataacttttttattcacctttttaaattcgaccttcagtgatctgtagttattattcttcattttctagcttgtattattgcaaatagaaatctgtttcacatctgatttcattctcatttttttggtttctaaatatttgagattttctcatttttatacagagaagtttctaatttttttgaagtcacattgtgtgattggtgacttccctaatctcataacatgttcccttttaagtggaatcaatattaaatgacatgtattaaggtttattatcagaaactcatggaatctcaaggttaaatgggaccttgaaggccatttagtccaaataatcatacagtgcatggatatttcagtaccattatcaagtaattctctcattcatgcttacataggttttttcttttccaagtcagtttagtccagcttctaggttttggtgctttgttaggtctctttccccgttagtcctaattttatcctttggggtcctatgagtaaacctaatccttttgtactctggcagttcatcaagtatttgaagagcactattatgcgactttaaaactcttttataactgtctttaraaaaagaaaaatttgggaaattttatatcccttagtagatgatggcagagaggtagcagagcaaagatggctaaactaaaacgtggatcagatttgcaaaactccattttctagccaatatcataggaaaattaaagaaaagagcacttgctatctattactgtctccagaaaaaacctccagctttgttaaaggtataactttaaaaagcaacaacccgcaaacacgcatagaaacagacacacacatgcaagcacacttctaccctcagtctagacaatacttacctttgttcactttttgcgtaatgattctgatcattcagtgcctctatttggtatctgtttggtcaaatgatactattgttgctgagtacaagggatagaacagttggattttgcccctttttgtttagtttgttcattgcatttattttgcaccaagctcttacatgacccagcagtaactagagagtgaaattgaataagatcatttggttttagtctaggccatatgcttttgccactgttgagcaaaaatacggaaaagtaaaatactctaaatggaaaaatacacaaatgttagaaaataccaagccttttaagaggctagagaacaacccagaggcagtaactgctgagttcatagctttagtaatttctgcagagaactaattgcttcttcctgtgtgctccataacacttcagacattatattaagaaaatcatttgtgggtctgtcttcttgtgtgacttgtgccccttgaagtcaggggccatatcttatattcattatatttctgggaatgctctgcgttttattgaatacagcagaatatagtcatgcatcacttaatgaacgacataagttctatgaaatgcgtcattaggtagttgtcattgtgtgaacatcatagaatatacttacacaaacctasatggtatagcgtactacacacataagctatatggtatagcctgttgctcctagagtacaaacctgtacagcatgttactccactgaatactgtaggcagttataacacagtggtaagcatttgtttatctaaacatagaaaaggtacagtaaaaatatggtataaaatatgagagacagtatgtcttctgtagggcacttaccataaatggagcttgcgggactggaagttgactcactgggtgagtccgtgagtgagtggtgagagaatgcgaaggcctagagcattattgtacactactatagacttcataaacactgtatgcttaggctacattagatttatttaaaaaaattttttttcttcaacgatgaattaaccttagcttcctgtaacttttttcactttgtaaaagtttcattttttttaactttttgactgttatgataacacttagcataaaacacattgtacagctgtacaaaaatattctttacatatgcttattctataaactttttctgattttaaaactttttaaactttttttgttaaacattaagacacaaaaacacatgttagtctaggcctgtggagggttaggatcgtcattatcactggctttcccctccccatgccgtcccactgaaaggtcttcgtggacaataaaccactaacatattcatttgttatcattttcaagtattatgtatttcatgtattgtatgtgcaatacttttatacaactggctgtgcaggtttgtttacaccagcatcactacaaacgtgagtaatgcttccactgtgacattactaggtgatagaaatttttcagctttgtgttattaatgttatgggactactgttgtatatgtggtctcttattgaccaaaacgtcattatgtggcacatgactgtacctgttcccctcactttcccattcttagagtcacataccttaaaaagaatgtctcatcttggggaaaacaccattgcgatgacagaggggtctgttatatctaggcttagaactaagaatgaaagttattacaggattgtataggaaattcctgggagaaaaaaaaaaaaacagtgggataggtttagggtatagacttagaaagtagtgtcatacataaacaggattagtaaacacagttttggtgtggctatttgaaattgctgaatgaaattgttatgctactaattcagtgaagaaattattataatcatatacatataaacatacttttcattacaaagtttggtgtgctatacttgttagattttaaaaacatgtttcttatccctgaaagcaaggcagatagttttgagcacagagctacttgaactaccataggaagaagaaaaagttttgacagcaatcagtcaaccaatcaaatatgtagccgtttgtgctaagcaaataactyattttcttgtttctccagagaatactggacaaattatacatggcgaataagatgaggcaaggagttttcacgtttttaaagatcatatccaggctatttaatacacttcactagtagaatataaagtaagttacactgaagaagaaatgaataataactaatggtctttaattttttaatttttatttcaattgtttttgggggacaggtggtggttggttacacggaaaagttctttagtggtaatttctgagattttcgtgcacctgttacccgagcagtgtacagtgtacccagtgtgtagtcttttatccctcatccccctctcacccttccccccaagtccccaaagtccattatgtcattcttatgcctttgcatccatatagcttagctactacttattagtgagaatacacgatatttggttttccattcctgagttacttcacttagaataatggtctccagttccatccaagttgctacaaatgccattatttcattcctttttatggctgagtactagtattccatggtgtatatatataccacagttctttctttcttttcttttctttttttttttgagatggagcctcactctgttgtccaggctggagtgcagtggcatgatcttggctcaccgctgcagcctccacctcctgggttcaagcagttctccttcctcagcctcccaagtagctgggattacaggcatgtgccaccatgcctggctaattttgtatttttggtagagacagggtttcaccatgttgcccaggctggtttcaaattcctgacctcaggtgatccacccacctcatcctcccaaagtgctgggattacaggggtgagctactgtgcccagcctataccacagtttctttatctgcttgtcgattgatgggcatttgggctggttccatattttttgcagttgcaaattgtgctgctgtaaacatgggtgcaagtatctttttcgtataatgacttactttcctctgggtagatacccagtaatgggattgctggatcaaatggtagttgtgtttttacttcttttagtctccacactttcttccgtagtggttttactagtttgcattcccaccmgcagtgtaaaattgttcccttttcaccatatccacaccaacatctgttatttttttatttcttaattatggccatacttgcagaagtaagatggtatctcattgtggttttaatttgmatttccctgatagtaatgttgagcattttttcatatgtttgttggccacttgtgtaycttcttttgagaattatctattcatgtcctttgcccactttttgatggggttggttttttttcttgctttgtttgagttccttgtagattctagatgttagttagtcatctttgtcagatgcatagtttgcaaagatcttctcctgctctgtggtttgtctgtttactctgctgatgatttcttttgctgtgcagaagatttttagtttaattaggtctcatttatttatttttgttttagttgcatttgcttttgtgttgttggttgtgaattctttgcctaagctaatgtctagaagagtttttctgatgttattttctagaatttctgttgtttcaggtcttcgatttaagtctttgatccatctggaattgaattttatataaagtgagagatgaggatccagtttcattctttacatgtgccttgccaattataccacaccatttgttaactacggtgtcctttcttcaccgtatgtttttgtttgctttgttgaagatcagttggctgtgagtacttgggtttctttctgggtcctctcttctgttccaactaattgtcttttatttggagtagtacaaaattttaaataaaaataaatgaagtggggctcacttctgttggtttttttaatctttaattgtgtaatatatataaaaatagcagctaaagtttatgtttatgtattcaaccagcataataacttttactttaatataaggatagaaaatataggaaagtgattgacatatgcrtatgtcttttgttgaatgccatcggtcaaagaccaccagaaacatatctgtgattaacaaagttaaatttatttcgcttgttgcctcaagggaggacacacccagaagagctttgagagaatttagaggaggacttagaaggggcttcttgtagggtctagacttgtactaaatatttctaaaagggatttgggaagctgggatcagttccagattggatactctcaagaaatagtgcaattcagtagttcagaaatatctgttcgggaggcaggaggaatgaagccaggctggtgatgtcattagtcagaaagcaagtcactaggaggaaaagattgttggccacttttctagctgtggtatgggcttgcataagaacattcttttatgtgggcttgttccatatcctgttggaaatagtcattatcagccaggcaaattggtagttcctcaatatttaacatactgctgatcctaggttaattttttaatttatcccaaacttcatacttcaaaatactaatrtacatattatccttcactcgagtttcataaggattattacactgcagggttggtacatttctatggcataaaaatatgccacaatcaatatgcgtttcatgcagtcattgtatgcataatttaaagtaaatatgaagtttaaaattaatgaaaaatgacatgtattaaatatagaaacaaatctttactttcatcatagctttttataattactgacatatggatatacttgaagctgttagaagtcaataggtcaccagctagaatattaagaactatcagatagatatttgtatgacaggaacttattaccaatattctttcttttggagtgaggttcttctctgtaatgaggaagtggatatttactcctggtaaggttttatcgatctcaataaggttctatcttttttggtatagaggagaaaggaaagttgatctgcatgatttttctaattatcttcgtttgaatacatttcactttttcttggaaattatttaaggccctgtctttttttagccactgttttattaatgtggtaaatcaatttctgtagcttctcacattgggattataactttctagggatgcaggaaaatatataggatagtaagataaaaaatacctctcctttttgtttaaataaaatatgttttcttataaagttagtggagtgtggagaaatctgttttctcagcttatttaaatattaattcttttcatcaaaatttttttcactgacattaatgaaaaggaggtcctgtcttcctggtgattcacagagagaaataagaaacaattgttagtaaatcaaatactttaagatttgaatcacattattatcatcatcatcactatcatcttgtgttagagtttttctgtgagtcaaacattgagtgttttatttccattatccctgaccctcagagcgaccacagaagataaatattatcttctctttttaaaaatgagaaacatgaaactcagaggaaggttacatgatttggtcaaacttacatggttagataatggcagagccaggattcatttaaaatgtctagccctagaggttatcctccttgttagaactcaccagtgattccctagccaggcacaggccacacctccaaagacgttgctagagggtttcatgcagtttccatggacatgttcacctgcccatgtttaggatgaaagtcataaagttaggggaagggaagaaagattaaagactgctatagtgaagtaatgagggagaaagaaattaaaaggaaggacacaaagcacattttaaacatgcatgaatcaaattactgttgtttatgctgacagtgtttgttgcttaatgaactaaccacatcaagcaaagataggtttgacttcagggtctgctggatctggggactcaaactgtatcatgcatctgactgtctctgtttctgtaaaacattgtcttattctgccttctattgctataagtgaataatcaagactgggtaatttataagggagagaggtttatttagcccacagttctggagaccaggaggtccaagattgggcagctgcatttgatcagcttctggtgagggcctcgtactgggtcttaacccagcagagaagaagaaggggaagtgggcacaagcaaagacgccaagcatgagaggcaaccacactttataacaactcactctcgtggtagcaaattcagtcccatgagggagaactcacttctactccaatgagaaaggcactaatcactctcacaacatcatcacctcttaaaggccccacttctcagcatcattatattgccaactaaatttcagcataaattttggtggagacaaaccacatccagcccataacaactacccaccttctttctgcttcattctctgccctttctttctgctggctcccctcactcttgttcctttccctttctgatctttctctcctattctttctccttcccttctgtgctccctctagtcctttccctgctaccagatgacttcagcctctgtgtctccatttcctgtctgcatctgcatggtttttgtttccttaggctcttcatggtttgaggaatatggccattagcagctctgggaccacagccctttagctgcagaggtctttcccagttgtgcagtaaaaaatttcaaggaacaattctgagctgtttcagccaaatatctatacctgcattagtcactgttctgcagatagagtgtgatgattarccagaagtggagcaaggtgctgtgattgggaactgcaccagaatcacaagatctsaatagaggagagcaattccccaaatcatacttgagagatcactggaagattctaacaggcatttggcagataaaaataacatgcctactgtgcttttctatttagatttatattttctatagtttattcttaacctactagtactgctaactaaaaatcgagtgtttcttgtgttaaaaaaacatgcttttacaaaaaaaaattaaattttaataccattgcaactgaaaggagatataaatgaggatattcagaatttcagcattaatgtttaagtttcagaatacacaaacatgtttttattggttaaagaatgtttttcacttcattgcaaacttaaccaaaaagaagagtagttgttttactttagatgttcatcatatattgttcaaacagctgctttttcaaaagaaagtctatgtcaggtaaaattctatttgttgctttgcaagctgtacctctagatgatagatttcatgtatcttagaattagatttctgtgttcttagattcctgtgttcctagcaacttgtagggaataccttaaaaagtatctacttgggggtggagccaagatggccgaataggaacatctccagtctacagctcccagcgtgagcgacacagaagacgggcgatttctgcatttccaactgaggtaccggattcatctcactggggagtgccggacagtgggtgcaggacagtgggtgcaacgcaccatgcgtgagccgaagcagggtgaggcatcgcctcacccgggaagcgcaaggggtcagggaattccctttcctagtcaaagaaaggggtgacagacggcacctggaaaatcgggtcactcccaccctaaaactgcacttttccaacgggcttaatggcacaccaggagattatatcctgcacctggcttggaggatcctacgcccatggagcctcactcattgctagcccagcagtctgagatcaaactgcaaggcagcagcgaggctgggggaggggcgcccaccattgcccaggcttgagtaggtaaacaaagcagcccggaaactcraactgggtggagcccaccgcagctcaaggaggcctgcctgcctctgtaggctccacctctgggggcagggcacagacaaacaaaaggcagcagaaacccctgcagacttaaatgtccctgtctgacagctttgaagagagtagtggttctcccagcacgcagcttgagatccgagaacgggcagactgcctcctcaagtgggtccctgacccccgagtagcctaactgggaggcaccccccagtaggggcgcactgacacttcacacggctgggtactcctctgagacaaaacctccagaagaacgattagacagcagcatttgcggttcaccaatatccgctgttctgcagccactgctgcctgatacccagacaaacagggtctggagtggacctccagcaaactccaacaggcctgcagctgagggtcctgactgttagaaggaaaactaacaaacagaaaggacatccacaccaaaaacccatctgtacgtcaccatcatcaaagaccaaaggtagataaaaccaccaagatggggaaaaaccaaagcagaaaaaccagaaactctaaaaatcaaagcgcctctcctcctccaaaggaacgcagctcctcaccagcaacagaacaaagctggacggagaatggccttgatgagttgagagaagaaggcttcagaagatcaaactattccgagctaaaggaggaggtttgaaccgatggcaaagaagttaaaaaccttgaaaaaaaattagacaaatggctaactagaataaccaatgcagagaagtccttaaaagagctgatggagctgaaaaccacggcacgagaactatgtgacgaatgcacaagcctcagtagccaatgcgatcaactggaagaaagagtatcagcgatggaagccaaagtgaatgaaatgaagcgagaagagaagtttagagaaaaaagaaaagaaacgaacaaagcctccaagaaatatggaactatgtgaaaagaccaaatctacgtcctgattggtgtacctgaaagtgacagggagaatggaaccaagtkggagaacactctgcaggatattatccaggagaacttcccaaacctagcaaggcaggccaacattcaaattcaggaaatacagagaactccacaaagatactcctcgagaagagcaactccaagacacctaattgtcaaattcaccgaagttgaaatgagggaaaaaatgttaagggcagccagagagaaaggtcgggttacccacaaagggaagcccatcagactaacagctgatctctcggcagaaactctgcaagccagaagagagtgggggccaatattcaacattcttaaagaaaagaattttctttttttttttttttttaatttatttttttattgataattcttgggtgtttctcacagagggggatttggcagggtcatgggacaatagtggagggaaggtcagcagataaacaagtgaacaaaggtctctggttttcctaggcagaggaccccacggccttccgcagtgtttgtgtccctgggtacttgagattagggagtggtgatgactcttaacgagcatgctgccttcaagcatctgtttaacaaagcacatcttgcaccgcccttaatccatttaaccctgagtggacacagcacatgtttcagagagcacagggttgggggtaaggtcacagatcaacaggatcccaaggcagaggaatttttcttagtgcagaacaaaatgaaaagtctcccatgtctacttctttctacacagacacggcaaccatccgatttctcaatcttttccccacctttcccgcctttctattccacaaagccgccattgtcatcctggcccgttctcaatgagctgttgggcacatggggggggctgacccccccatctccctcccrgacggggtggctggccgggcwgaggggctcctcacttcccagtaggggcggccgggcagaggygcccctcacctcccggacggggcggctggccgggcagggggctgacccccctacctccctcccggatggggcggctgccgggcggagaggctcctcacttctcagacggggcagctgccgcgcggaggggctcctcacttctcagacggggtggttgccaggcagagggtctcctcacttctcagacggggcggccgggcagagacgctcctcacctcccagacggggtctcggccgggcagaggcgctcctcacatcccagatggggcggcggggcagaggcgctccccacatctcagacgatgggcggccgggcagagacgctcctcacttcctagatgtgatggcggctgggaagaggcgctcctcacttcctagatgggatggcggccgggcggagacgctcctcactttccagactgggcagccaggcagaggggctcctcacatcccagacgatgggcggccaggcagagacgctcctcacttcccagacggggtggcagccgggcagaggctgcaatctcggcactttgggaggccaaggcaggcggctgctccttgccctcgggccccgcggggcccgtccgctcctccagccgctgcctcccaggcggcgctcgccggcgcggcggcaaagactgagacagctccgctgcccgctgaactccatcctcccggcggtcgggcggcggcggctgccaagaaaagaattttcaacccagaatttcatatccagccaaactaagcttcataagtgaaggagaaataaaatcctttacagacaagcaaatgctgagagattttgtcaccaccaggcctgccctaaaagagctcctgaaggaagcactaaacatggaaaggaacaaccggtaacagccactgcaaaaacatgccaaattgtaaagaccttcaagactaggaagaaactgcatcaactaatgagcaaaataactagctaacatcataatgacaggatcaaattcacacataacagtattaaccttaaatataaatgggctaaatgctccaattaaaagacacagactggcaaattggataaagagtcaagacccatcagtgtgctgtattcaggaaacccatctcatgtgcagaggcacacrtaggctcaaaataaagggatggaggaagatctaccaagcaaatggaaaataaaaaaaggcaggggttgcaatcgtagtcttggataaaacagactttaaaccaaccaagatcaaaagagacaaagaaggccattacataatggtaaagggatcaattccacaagaagaactaactatcmtaaatatatatgcactcaatacaggagcacccagattcataaagcaagtccttagtgaagtacaaagagacatagactcccacacaataataatgggagactttaacaccccactgtcaacattagacagatcaagaagacagaaagttaacaaagatatccaggagttgaactccgctctgcaccaagtggacctaatagacatctacagaactctccaccccaaatcaacagaatatacgttcttttcagcaccacaccacacctattccaaaattgaccacatagttggaagtaaaacactcctcagcaaatgtaaaagaacagaaattataacaaactgtctctcagaccacagtgcaatcaaactagatctcaggattaagaaagtcactcaaaactactcaactacatggaaactgaacaacctgctccctaatgactactgggtacctaacaaaatgaaggcagaaataaagatgttctttgaaaccaacgagaacaaagacacaacataccagaatctctgggacacactcaaagcagtgtgtagagggaaatttatagcactaaatgcccacaagagaaagcaggaaagatctaaaattgacaccctaacatcacaattaaaagaactagagaagcaacagcaaacactttcaaaagctagcagaaggcaagaaataagtaagatcagagcagaactgaaggagatagagacacaaaaaaccgttcaaaaaaatcaatgaatccaggagctggttttttggaaagatcaacaaaattgataaaccgctagcgagactaataaagaagaaaagagagacgaatcaaatagacgcaataaaaaatgataaaggggataccaccactgatcccacagaaatacaaattactatcagagaatactataaacacctctatgcaaataaactagaaaatctagaagaaatggataaattcctcgacacatacaccctcccaagactgaaccaggaagaagttgaatctctgaatagaccaacaacaggctctgaaattgaggcaataattaatagcttaccaaccaaaaaaagtccaggaccagatggattcacagccgaattctaccagaggtacaaggaggagctggtaccattccttctgaaactattccaatcaatagaaaaagacggaatcctccctaactcattttatgaggccagcatcatcctgataccaaagcctggcagagacacagcagaaaaagagaattttagaccaatatccttgatgaacatcgatgcaaaaatcctcaataaaatactggcaaaccgaatccagcaacacatcaaaaagcttatccaccatgatcaagtgggcttcatccctgggatccaaggctcgttcaacatacgaaaatcaataaacgtaatccagcatgtaaagagaaccaaagacaaaaaccacatgattatctcaatagatgcagaaaaggcctttgacaaaattcaacaaccttcatgctaaaaactctcattaaattaggtattgatgggacgtatctcaaaataataagagctatctatgacaaacccacagccaatatcatactgaatggacaaaaactggaagcattccctttaaacactggcacaagacagggttgccctctctcaccactcctattcaacatagtgttggaagtcctggccagggcaatcaggcaggagaaggaaataaagggcattcagttaggaaaagaggaagtcagattgtccctgtttgcagatgacatgattgtatatctagaaaaccccatcgtttcagcccaaaatctccttaagctgataagcaacttcagcaaagtctcaggatacaaaatcaatgtgcagaaatcacaggcattcttatacaccaatagcagacagagagccaaatcatgagtgaactcccattcacaattgcttcaaaaagaataaaatacctaggaatccaacttacaagggacgtgaaggacctcttcaaggagaactacaaacctctgctcaatgaaataaaagaggatacaaacaaatggaagaacattccatgctcatgggtaggaagaatcaatatcgtgaaaatggccatactgcccaaggtaatttctagattcaatgccatccccatcaagctaccaatgactttcttcacagaattggaaacaactactttaaagttcatatggaatcaaaaaagagcctgcattgccaagtcaatcctaagctgaaagaacaaagctggaggcatcatgttacctgacttcaaactatactacaaggctacagtaaccaaaacagcatggtactggtaccaaaacagagatagagaccaatggaacagaacagagccctcagaaataatgccgnnnnnnnnnnnnnnnnnnnnttgaatctcgccctgtggtggaattctatctgatttttgacaagcctgacaaaaacaagcaatggggaaaggattccctatttaataaatggtgctgggaaaactggctagccgtatggagaaagctgaaactggatcccttccttacaccttagacaaaaattaattcaagatggattaaagacttaaatgttagacctaaaaccataaaaaccctagaagaaaacctaggcaataccattcgggacataggcatgggcaaggacttcatgtctaaaacaccaaaagcaatggcaacaaaagtcaaaattgacaaatgggatctaattaaactcaagagcttctgcacagcaaaagaaactaccatcagagtgaacgggctacctacagaatgggagaaaattttttgcaacctactcatctgacaaagggcyaatatccagaatttacaaagaactcaaacaaatgtacaagaaaaaaacaaacaaccccatcacaaagtgggcaaaggatatgaacagacacttctcaaaagaagacatttatgcagccaaaaaacacatgaaaaaatgctgctcatcatcactggccatcagagaaatgcaaatcaaaaccacaatgagataccatctcacacacctgttagaatggcgatcattaagaagtcaggaaacaacaggtgctggagaggatgtggagaaataggaaggaacacttttacactgttggtgggactgtaaactagttcaaccattgtggaagtcagtgtggcgattcctcagggatctagaactagaaataccatttgacgcagccatcccattactgggtrtatacccaaaggattataaatcatgctgctataaagacacatgcacatgtatgtttattgcggcactattcacaatagcaaagacttggaaccaacccaaatgtccatcaacgatagactggattaagaaaatgtggcacatatacaccatggaatactatgcagccataaaaaaggatgagttcatgtcctttgtagggacatggatgaagstggaaaccatcattctcagcaaactatcgcaaggacaaaaaaccaaacaccgtatgttctgactcataggtgggtattgaacaatgagaacacatggacacaggaaggggaacatcacacaccggggacagttgtgtggtggggatagggggaagggatagcattaggagatacacctaatgctaaatgatgagttaatgggtgcagcatgccaacatggcatatgtatacatatgtaacaaacctgcacgttgtgcacatgtaccctaaaacctaaagtataataataataaaatttttaaaaaaagtatgtacttttcattcaatgaaagagcagtatttgagaggcatcattcactgttgttaaaaatcctcaatctgccatttactagttgtggtaggcagaatactagcccccatagatgtcaacatactaatccccagaacctgtaactatgttaccttatgggataaaaagactgcggatgtgattaagttaatcttgagatggagagattatcttgggttatctggataggcccagtataatcacaaggattctttaaaggaggctcagaatcagagacgatctgatgacagaattagaggtcatagtgatgcatggccacaagccaaggaatgtgagcaggctttggaagctgaaaaagacaaggaaatgtgttttcccctagaggctccgaaggaacacatccctgctcatccattttagacttatgacctccagaactgtgtgggaataaatgtgtgttttaattcacttagtttctggtattgtgttacaataacaataggaaactaatatctgaagtgtttgaccttttgttgcccagttacctcagagcattatttgaggattaagtgagtttattcaaggaaagtgcttgtcaaatacaaacacrtgtgtgtatatgtatgtgtaaaggaaaagaaacctcttttttgttttactgcttatttcacttctggtcaccaaaatttgcaagtttttcctaccatgagcactcttccaacagcagttaggtgtcctataatttgattctgttctaacactgtctgcttggaattaacgtcagatccagtgagttaaaggctcagtcccagaagactacaccccactttagaggctactygctagtagtaggttgtcatctatacttcttatctgctggctgtcaattgggggttcccatgacctcttcatcaagtttaattatttgctagtggtgcccacagaactcaggaagatakgtttaccagtttattataaaggaattacaaaggctgcagatgaatggccagatgaggaggtacatagggcaaggtcagtgggcaggggcaaggagcttccatactccctcccagtgctccaccttcctagcacctccacacgttcagtaacccagaaacactttcaaccctgtcccttggggtttctctggaggcttcactgtggccaattgattatatcattccctccctggagatcaggcatggggctgaaagttccacccatccagtcacatgattgtttcctctggtaccagcccctatctggagactatccaggagcccccagccatcagtcgtctcattatatcttagtccatttaatgtgttgctgtaaggaatacctcgaggctgggtaatttataaagaaaagaggtttatttggctcacagttttgcaggctgtacaagaagcatggtgccagcatctatgtctggtgagggcttcagattgcttccactcctggcagaaggtgagggggagtcagcatgtgcaaagacgacatggcaagggaggaagcaaagtgatggagagggaggtgccaggctgtttttcacaaccaactattgaaggaactaatagagtgagaactcactcacacttcctccccgtgcaccttccaacgcaaattaaattattcatgagggatccacctccatgactcagacacctcttactaggtcccacctccaacattgggcatccaatttcaacatacatttggaaggcacaracattcaaactgtagcacgttaacatataaaaatgtacttatcacttatctgagacactcatctgaaattccaagagatttaggggctatgtgccaggaaaggaagaccaaatacatatttcttattataaatcactcacagtacatatacaggtaatgtacataaaattatgaactgcatttagagaactgaagatggttctaatgaagatcagaaaataaaaaacgcatgcatgtgtaatttaagttcaattttatataattaacaagtrtacaactgttaataaaagtcacacgttcatgactctagaagagaccttaaatttagaggttagctaatctaaccttttaccccataaggattccgtactatattactacacggcatttctataccatatccctatgtgctgtctgccattagtccattgttgggtaacttaaatggttagaaatacttctatgcattaagccaaatatagtaamttctttttggaactacatcgtataaggatgtttttccttttgagagccctctctgaaatactgacaatgctaatcaagacctttcctatactcaccacctactatcacttcaagcttttgtactctagactaagttttcctcccctcctttttaaaattctgttgacgtaagtttccatttgctgttttgaaatttgttacattggtttccttgagcttcctgtcaaactagcttcaaaatatttttactggggctagtctggagtcagtttttagtctttcttcacttacatatttgaacagttgactgtttttgaggggagaagggctctaatagcaggacattgcctttatcctgattaaatgttcttgtcaatcatgtgatgctcttcagcagttgccagggagtcatcattctgaaaaccagatttactttttctgttttttattcgtatttccacttcttttaagttagcaggaagaaatgctgaattcaccaatgcctttggtcccttgtccaggacttcagagtcactagaaatggtctgtatttcttatggtaaagttgtgcatctctacaagattccataaaagggattagtagtgtgtttgacctgttgtcttaagcatactctcagtcatctcttggcatatacatgtgaatgaggtagcctcataataaccttgtgctgccttttcaggagtcactgttaacctctactggtctctttctctggatactggagcatggtgcaaggattcttcaactctcatgaattcactctcgtgaattcccattattattgcatgcacctttacaagccctagagtaactactaagaaaggcctcatgttgccttatgagtctctaagcctcctcagagtctacgcacctcaagaatatttttattggatccttttcccctccctaacctcattcctacctctctttttactactcttctctcttcttcctcccctcctctttttttctctctgtcctccaaataaatgtgcaaagtcatgctctgaaactgaagttccttgtacctaggagaatcctcatcttactcagcgcaaatttgctcctactgtagtaacagcttttgctgctgactgattacaaccgttttactgttgtaagcttccagctcatgatggttttagatgtgcactgtccagcacaaagccactcgtcacagctggctgctgaacacgctgccacacgttgaaatggtaatattgtggatatagtagggtaaataaaacgtgctattaaaactcatgtcttttttaaacattgctactggaagtttacaattacataggaagcttatatttctactggacagcacttttcaaacattctaaactaaaaggaaatatataaagagattaatttatgcaaaggaaaagagagaaataaattacgtattaaaaagtaaaatatggctgggtgtggtagctcacgcctgtaatccccgcactttgggaggccaaggctggcagatcacttgaggccaggagttcgagaccagcctggccaacatggtgaaaccccgtctctactaaaaatacaaaaattagctggctgtggtggctcacgcctgtagtcccagctactcgagaggatgaggcacaagaattgcttgaaacccaggaggcagagtttgcagtgagccaagatggttgcattgcgctccagcctgggcgacagagtgagactctatctaaaaaaaaaaaaaaaagtaaaatacatagcaatcttgaaccgttttgagtaagtacaaatgtccctgcacatctcagtagtccagagagcattgctatattattccaaaggctggtggaggttcataataattggccctgaattgtcaagaagagtaaaattatgtttggagtgatctgtttttcagtgtatagaggtatgtaatatatttcataaagaaattctatcaagaaaagagaaattaaaatgctaaattagcagttatgttaaaaacttggctatctggaatgatttagttcttgagtgttccgatttttatggtagcagtattctaataagacaaagtgataatttttatatgagggtagttgataaatttatgggaggaacataagtcattcaacaaatagaaacgacagaatactcaaaaacactttcttcagagattcttcttaatatttgtattatttttatgtgaagtatttatattgaaataattatttcagaaagaactcatttttgtttaaaccagtatgccaatatgatctcttcatttaagaaactgctgtatatgtagtagctgcaatctcagaactctcaggatatatgaacaaagcgtattgtgatttataggaaccaggccattgtctgtgaaaagaaaattactttcctacagcccttgctcttatcgggatgcttggcccctggatgcgtaagcctactgagggctgaagttttgggagtcgcctattcagggattgcctgacctctgcatcttataaccatatcatcctgaggaattgcagactgatgtggaggcatgtgactgctttttgaatgatgtcagaactgtcttgtctttgttgtgattattgtgtatgattgcattttatccttcatagtctgtcattgatttacaaaacgtctcagaaagatgtagtgagtgcaattatggtttcctcaagaagcaccaattgtgatttacttcttcagctgcacacacttcagttatttttttcttatattttcccaaaagtatcactaaatctcttactgtgttagatttcattgactttagtgaagtctgattaatatyctttctcatttaagcccttctgggtttttttttttttttttgagtctcattcatttactagttctctttgaatcacgtcatttattttttcatttaacaaatatacaggcactgtttacaatatgccaagcacaatacagcactgatacagataacagaaatcttgaattgttggagaaagtgatggagtttagagctagcatgctagcagtggcaccaaacccgcagcaacttgttcatttagtagactgcagggcccagctgttgctgatgaaagtaatcacccgtgtgaacattatctgtcaggtgtgttgaggaaaaatcattcggaatcatttctaagaaataacagcgccaagcactatattcttaaagctttcggagatttaccattggtatgtaagggctgtttgtatcagtttatgtctgtgtaaataaaagatttagatcagagaaatgatggttcctaaccttttttgggtcatggaccactttaaggagctaataaaagcacctttagatccactccttagggagaaaatacattgcacatttgaacatacactcaaattttgcctctagttgtcaagtatttacagaatttttgaattccatgaaattaccagaggttaagaacttctgatgtacacataatggttagaaatataatcttagaacaggcttgacaagataaactagtttgatatccttatgattaagactcagaataagcaaataacttgcctaaaattttaaaactgtagtgtcaaagctaggactggaatctgtgccctttgacagtgtttttaactgaaatggtgtggagtgatttcatgaaggaagttatgtgtaagtttggccatatgtttgtggcaagattttaacaagtgnnnnnnnnnnnnnnnnnnnncagtgtgatggatttaaggagtaatttagggattagctacaggactgttataggaggtgggtgaaagaaaaatacataaataaattgtagcaataagaatggaaaaaagggccgggcgcggtggctcacgcctgtaatcccagcactttgggaggccgaggcgggtggatcatgaggtcaggaaatcgagaccatcctggctaacaaggtgaaaccccgtctctactaaaaatacaaaaaattagccgggcgcggtggcgggcgcctgtagtcccagctactcgggaggctgaggcaggagaatggcgtgaacccgggaagcggagcttgcagtgagccgagattgcgccactgcagtccgcagtccggcctgsgcgacagagcgagactccgcctcaaaaaaaaaaaaaaaaaaagaatggaaaaaagaaagtagggacaaggcattgtatggattataatgtagcagaatctgtattttaatgtgttaggttaatgtgtaactagggatatcatgttacatatctgtaaatgagtggtaaaagtaaaaatatttacatttatatttagattaatactttgtccaataatctttctgaacatagttatagcagaagtcacaattgattcagcttggacttaatggatatattaccacggattcagacttcacatatagagaaatgctcattaatttggaataacctaattaaataatgtagttcatttagtaatctagtggctaaaatttaacagtctttacttcttatatagccagtttcaagagggttcgcaatttggtcaggaagagtttcagacgttttaaagaaaatattatccaaggaaagcaattttgctaaatattatatctaaaaggctataaaaagggctattgagatataatgtctagaaaaccagtttgctttttctcctaagcgtaatattagcttcaaaaaaagtgactcagtgcagttgaacattcacttactaaacataattaaccgtctcttattataaagttaatactatgggctattgtgatgtcatgattgcttttggttttaacttgcttcattttaccttgatctcctttccacatttcgttcagttgaaaaggagatgtatgaaaatgtttattatgatttcagaaaaatatggaggacactttrtaagttgaggaaatgaagaaggcatgttagtggttttttcaaaagttagtttgtggtattttgcattagaaagttgtttcaagtctgtctaaatataagtcaggagaacatttttattcgaagtagcaggagaaatggaaggtggagatgttcaattttagatcatcttaaaattatcttattgggaaaccattcgcctgtatgtagagggcatgaagccacatatcagctgtttatattaattttcttatctgaatatatttaatcccatccctaatgtcagctttattgtgtagtttcttcttattttaaatacctagtaaaatagagtatcaacatttctacctaaaacaatgttatattaatgaaattggagtcattcctcctcttttgggtgtgctggtataaacttgtctgactagttaccacttcttagagggtagnnnnnnnnnnnnnnnnnnnnttaccacttcttagagggtagattttagatatatataattttcagttggtggtgttagcttttgttaggtgagaactcagaactaacttgttcctcttgctttttagaaagctgcttggattaacttgtgataaacatcagacttcatgcatacaaagccttgctatgatgtaagacactgatggtaatagtttttccagggttagtttttagtttatgtgttatccagaactttattgtagaatttgtccataataaatgtttaccatcatttctaaatatatatggaatgcctattaccctgaacctaagatagaaaatgctggttttttgttttgttttgttttgtttttaatgcagataacaagtgagaaggaaagagttaaaagatgtgcaaattagttcaggccagatgaattgcccctatatgaggcaaggttggtatctgcagtggtgaaattgtggcagtgccatcatagttctcagtagttaactttttctcttttttttcttttcttttctataggtgacatgagaatttttcagatttcaaaaaagacatggtttggctatttcttaacaaggttaaacagatacttatgatataacccagcaaccccactgctagatatttacccaagaaaaatgaagttatttgtccatacaaaaatactctctgtaaatgttgccagtagctttcttcataatcacccaaagacatttggtaacaacccaaatgtctggcagctggtgattggataaacaaattgagatacatccatataatggaatataacttaacaataagaaggatcaaagtaccgatatgtccaacaacatggacgaaacttaaaagcatttatactaagtaaaagatactagaatcagaagtttatatattctgtgattccatttacatggcattccgtaaaataaaactggggacagaaatcatatccatggttaccatggagggagggggattggagtaggcgattgatttcagaggggcctgactttttggtgtgatagaaatgtttcctgtcttgaagtgtagtgttcacacagctgtataagtttttcaaaacccacagaaccatctgaaaaggtgaatttaactatatgtaaattatacttcgaaaaatgaataagaaaagacacagtttaatagtagtcaccccttatccacagtttcacttttcaaggtttcagtgacctgtggtcaactgcctctcaaaatattaagtggaaaattcctgaaataaacaatttataagttttatatggcatgatgctctgagtatggtgatgaaatctcacacagacctgctgtattctgcccagggcgtgaaccttccctttgtccatagatccatgctgtctacactctctgcccgttaggcacttcgtagccatctcagtgatcagatcagcgtcctgctattgcagcacttgtgtgcaagtaatccttactttacctcatagtgacccagaagcacaagagtagtgatattggcatattgttccaattgttctgttttattagagattattcttaatctcttactatgcctagtttataaattaaaatttataaggggtatgtattattggaaaaaacatatatagggtaggtaccgtccgcagttttaggcatccacttacataatgggggaccttggaatgtatcccctgtgaataatgggggctactgtacatctaccatatattacaaaacaccccccgtggagactggggctgtactatgtaacagtgatrtttttgtagtgaaatatatgacagctgtgctgtgtagctgtgtacactaaatgggtcaagttttgctgccatctgagtttttagagctttttgggtttcagatttgcaaacaagggagtgtgaattgatggctgtagaaaaaggacctgtgatatagaacaaaatgtaaaaactattgccaagttgttttggatcaaatagggaatttacttttcctgatttaaatcactttttatgcagcagacactgtgatggtaaaaaaaaaaaaaaaaaaaaaacacatacacacacacacacacacacacacacacacaaaaaaaaaaaaaaacaaactaatatcccacttcccccagcccctagctgccattaacacagatagttgatggcttaaataatagtggttgtcctgagctcccagactgaacacatagcatcataacctgccatgcttagagagttccctccctccttccgtcttcctttcctccttttttgttttctttttaatatatcaaaaagttctttcatgtgtactgtggtcacaaaggctgttttcttttaaagtaccggcacactttgcagaaagtcccactggttaacagcttctagaggaacacctcttttaccttttaatatccaatttaaagaatgtatgtatttgataataccctctttttttggccgatgtgtatttattgagacacctattgatggctacaattgacaccacatcagaaacaagtacaaatgtttggaaaccctgctaactgtcaggaaatgggatgtgtatcttagatgttactcgtactaagagaggtcatattactgcctcctgcataaagcttttacaaagcttttattatatgagtgttatattgtgtttttgaaatgttttaggacattgattgaggtttttgtgttgacatttaatatattacaatttttaagacatgaaaataatatataaattttatgacataaaattatgacataaaaattttaatataggataatagagttgtatttggggccttttaccttttggattttttttttttttttttttgagcaggagtcttgctctgttgcccaggctggagtgcagtggtgcgatctcagctcactgcaacctctgcctcccaggtttaagaaattctctgtctcagcctcccgaatagatgggattacaggcacgtgccaccacgcccagctaatttttttgtgtttttagtagagaggaggtttcaccatcttgaccaggctggtattgaactcctgacctcgtgatccacccttctgggcctccaaggcgctgggattacaggtgtgagccaccgcacccggcctggaattttttttcacagctgctatgcaggggtcggggggttcatttccattttcctaaagaattggaaagcttctcaaataataacttcgtagtttgtctctagttccatactttggtgagctttttttcttttaaaaaaatgttgtaacaagtctataaagattagaattattgaaaaagtaactttcttttgaaagagctggtttttatttaccttctagttaaaacattaccaaaagtttagaattgttaaccaagtagatagtacaggttgggtaaaattgtttaactgcttactctacaattttcaggtactactttttataacaatttagtagagtgttttttctcaaataactttgttttgttttaagtctgtttaaagcaacattaaaaccatcttagaaaaactgcttaccaatactaagaatcaaatacaggatggaagtttaagagttgaaactttagaaatcgtttaacctgttcattttccagatgacagtaaaatgaaggttctgtgaagcatgaagtggtttacccaaggtcacacaagtaaactagtggcagagctagaactcattctagatctgttattcagtccagcattttttatttcacatgtttcatggtaatgaagtagttgtttggtgttcagtaaggaaaaaaaaagcttatgttttggtagtgataattttaagagtaaagaatatggaaaatggttattagggtaaaaggtaacttcttatatgctcattaaaaacactgcaaagtttcgtggtccaatagaagtttcagctcttctggtgaatggtctctctgcaatgttcagtatagaggtactagctagttacctgtgcctactgaatacctgaaatatggctggtgtgactgatgaacagaatttttatttttatataatttaattgtaagtgttgaggggagtggctaaaatattggacaatgtagagattatgttggtactaagcagagtgatgttagctagtttaaaaggtcaaggttccaggagacaaggaaagggtctctaccaggaaaatactctgttcaaacttagaatttaaggacaacaaacaactgtgtttagaatggatgttcagtgtttagattggccatgattctagacttaattggtggtatggactttgaagccagtatcataatgagtagaaatatctgatgggattaaaaagtacaaagaaggcattgagagctgtgataactttgtaatttaccccagttgttctgaatatatttttgaaagatcctggagcaaaataatacaggtgtgtctggagcccatgtttaagtatagcagagtatcagtctgtctgaatattgctttgagaggaagacctaactctaattcttgagattagattacttcctggtgctttagctgaattccttccacagccacatagctggtttttaattttcaaatctactagtgaaaacatgatggaatatataacctaaattaatattttattcttcatataggttgtcagtttagctacaagaatcaattcatctcttaatttgctggtaccttgatgagaaaacatctatatcagtgttatcaattcatggtactacttagcactctggaatataagagtccccacattaacctgagaattgagattctagactgaagtctttacatacttcttcccttgagatgcttgataagttcagaaattaaggtatgctatggaaaatgcaaaatggattcatcattggaatagacctcagtgaattttctttattcctgaaattcccttggcccaatagcctttgcttgcaagctcatctgtaaatttaaatgctttaaagtagttttgatgaacattttttgcttgttayattgatgtgattaacctagttaaagctaataattgtcattattttttaagttgtttgattgttattactatttgttactctctccttttgcttacatgtctttttccagaactcagatttgttagtttgtgctcacattttagcctagtgcagggcctgacagataatggataatacttagtgaaacctaagacaatctgtttaactgscttgacaccaatttcagatgatcccttaggagagtggttctgaaattgggggtgaggtgacacggagaaagggtgactttcaaatgacattcctctacttttatataatgcaaagtgttactgataggtttggataccatgcataatggttgaaagagaaaagtcagaatttttttttttttttttttttttgagatagagtttctctcttgttgcccaggctggagtgcaatggcacaatctcagctcactgcaacctctgcctcccggattcaagagattctcctgcctcagcctcctgagtagctggaattacagcatccaccaccatgcctggctaattttttgtgtttttagtagagatggggtttcaccatgttggccaggctagtctcgaactcctgacctcaggtgatccacctgctttggcctcccagtgtgttgggattacaggtgtgagccaccatgcctggcccagaattcttttttagcctctcattgctttaagaatttgtggttctatgttcatagtctttccatgctattccatctcaacaaaaccaaatgacttatttttacaaaactaagtctaccttcatcctgtcagtttctgaaggggcaaaagcacttacaatgttaaaattgagataagtcagtaatcatgacttctccttagtgatttaagttttcttcatttttactcaaaaagtaattttgcctttacactaagtgaaagagaagctgtttctgactactccagaaaaataaaaagagctttatttttcagctttgttttaataacatagctctttaacacataagcctcgtatttctccctctctctctctctgtgtgtgtgtgtgtgtgtgtgtgtgtgtgtttgtgtgtgtgtatgtatctttgcttctttcatatcattactattttaccagtaaaaacaatttagattttggaaagtaaactttttggcttactttcaaaaattccatttacttttattttaatagaaaatgttttaagccatctattttcttcattcctggttgctattatcttgactataattgcctagtttcctttctggctgatctattactagtctttatctggatgttattaaagaatataaatgctccatagagcaccatagtctcagccagaatattttcagattctcagctaagatgaaagagaactggtgctttggctgttaagtaagtagctcagatttgttatcagagtgtgaggggctctaaattcattatgttagctgttcctgggagctagcgtttgaaaaatcgcttcagctgtttatggattgtggtccttgggcaccagatagtggatgctagaatgtattgcagaaaagctgattaaagtactaggatctctagcaggaagagtagaaagtcatttgtaatacctgtgtctgactctgttggatgcacttaatatatttccttttgaaagctttggtttattatcagcttatccgggaaggaatagcatttttgcaaaaatgtgccttttggtgaaaacatcaataaactatgcttgatgagaagttcaggtagggagagactgatttgaactttgaggttcctaaatactttgcggttttattaccactcttattggagtcatgtttcactatgacttaaatttcaatagtagctacttttaagttcacagttttaatgtgtttttactgtctatcagggaatttatactttaaaatgtagactgtcagaatttacttttttttttgcccaccttcctctccaacaaaagtttgctgaagtacagtatggaagtattttatgtaatcacaaaacttgcagctttttaagtatactttgcactacccttgttaaaatattgcagtattttctcattactttcaaagtaaagttcaaacttcttagcttagagagacattcatgatgtttccatttcttctctgtctcgtccatacccattcccctgtgagtgtcctttgcttcagatacacagagctacttacaaccattccccttctcctttctttcactgtggtagcttccttctccctgaccctgcttcacctgaggattacttgtccttccttcaaaactgctcaagtttcccctcttccaggaaggcttccttgacccccaactacccttccaatcattaatcccatttacactgccaccacagctctctaacatttcatacaatttctttactgtaatcatttatttatttgtctgtctcctttaatagaataatattccttgaggtcagagatgatagtgtctttcgcgttaaaatctggcatacaggcctattgaagaaatgtgactctacgaaattaatacattttatagatacattgcgtaatttgatttactttgatcctggttctgtagacatttgggggcatgggttatgccattttcctcacaaggagcttttaaagttgactctctaacttccatattgctacctaaaatgtttaacaaaggtaggtcttgggctttgggaaggcaggaacttaaatagatggaggatataatgaaatgacctttactctgtcagttggctaaaaaatctgaaatacaatttatgggaaattagaaagaccaactctatgaccatgaaatcatatattctagcttatattcttaaacttataactttattggtatacaaagttcttttaagagaaaataggtatttaacaactttttactttgaaaatacctggttatagttttcagattttaacctaatcttaatccaggaggcaagacaaaattaaagctaaagaatatttgctaataatgggttatagcatttaagtatgtatttggtagccttgagatgtctttgtaatatttgcatcaatattctgcattctttagcaaaacaacatgcgaagtccatatttacacataagattttttaaaagttacttaatattatttcataatagaataacattttcatttagtctaatgttttattatatgagcacttagtatttgctttcatgtaattatttgttgagatactttgtataattatttctttagtgatgtagcaaactaagtcagtgtattacagctgaatcatagtcctggctgttctttttatttactgaaggaacaaacactgtattattaacattccttgtccttcaattgagcttgcaaaagaaatttgtttgttagatcttgaataccctaagaaatgtattatggatggtttttaattatatttctattttcatcatttgatatatttttaaaatcttgtgataaaatagaatgggggaaaattacccatgtcgcagtagttagatatctgctcattctcaaagaccccaagctccttttaaaaaatattttaagatttattatatgttaaaattggtattgaatttatatgaagtattaagattacagcatgtcagaatattattgccatttaagaatgtattcactgttttggtttttggagcaccgcctccaagaggttcatggcatttggtacgtagttcacgtatttctagtctacagaccttgcctatcgagtcaaagccttcgtggttctgatatttgcattttctactgctataaagctcaacaatagtaattaatgttttttttttaactttccatgtcattaccaataaaacttcagtttttagaagactagtaatttgtacctttaaagagccacattattttgcttttgtctcagaatgtattatgcttcccaagtatactgtgacagcctgaatagagaaaaggggggaggggacattgtcttcagctggcatgctgttatcagagggaatgtgtttctggacacgagatttagcattcattggttgtctgaagaaagctatttcatctgaggattggacaagaagctgcgtcaatttgctgcccgtctccaaggcactggtgatgctgccttcacaagctggctaacgtcacggctccatcacccagcggggtgtggactctctttttctgttcttctctatttaattctctatttgctgcctactgcatttcttaatctgtcttctgccaaatgctaacagcatgatattttgcaatcatctaggtgaatacaagaaagacgaactcctagaagctgctaggtaagtgattccattcattttaagtgtatataatgcattaaggaagagaaggaggagggcaggtggaggactataaaaaatataacgttattgtcttgcttggattttatgcaattatgcagatactaaatctttatatactttatatcattattgtatataataaaatcttttcatgtggtgatgattataaggttaattttatttggaacatttcctaaggtacctgtaaaccctagttgcccagcttttccagcgatattcttggagtatttaaatacctatatcttcattttcatctgaagatttttctagcaaagcttgaatgaagagcaaaaagtaaatgttaaaatcctcatctattttttttgtgttcttggtcgtttataatttaattgattagctctttacagcattttgtrtgtatttttaactccaacgttttagtctatttatcagaataaagtttgtttgtaattaagaagatgactttatgtagataaataaaacaaaaatgtagaaagctatgttatttaagatataccactatagggtaattaacaggaattaattagaaatatattaattgaattgaatattgcaaaagagatttattgtgatccatgtaaaagaaatcaaagcaaacccatattttactctcrtgtgaaaaaattatgcataaatattcataagaagctttgtaattttagaggaattgacttactacctttttataggagtggtaatgaagaaaaactaatggctttactgactcctctaaatgtgaattgccatgcaagtgatgggcgaaaggtaagttattttaaatacaatcctctttaattgcaatgcttcaaaattttgtgaatgtggcatatatatatataagcacgtatacctacatggctttattttaactggcatcttttcactgtaaatgaaatgctactatatctgttattggcagttgtgacacattcatagaactggtgaagcatggatcttaagtaagccttttctcttaaatgtcagacacagcaagttatttgttacatgaaactgcagttttgtcggtgattaaaattacagcatatgctcttttctgggtatgataatggaaactggaaatatgagtgtcctatttacccatctttgttaagacatttgtgtttttgatttcttatttggcagaagaagatttgtttgctagataccaacactttttccattaaagctgagaaattgctgttaatgatttttttacatctatgtaacagctctgctcttttattattatttgtactggctaagttttagttgtggaatattgaaagaaaatagattaaaacagagaggaatattctatattaatatgcagttgccataaatgtaaggtaatatataaaatatacagctggcagcttcattatctactttgtattcttgctgaagatagactgaaatgtaatcctttatggctttggtaattgcagagttttgtaatgatttacgtaatagacattgaaaaccaatgcactctgtaccataaagttggtttttttttaaatgagagttaattttttaatgttaactaaaaacctraaacatttttaaagacacattacaaaaattgaggaaaattgtatgtctgatatttagaaatgaattcttttgaaattatttacagtgaaaatgttacggcaaatatcaggatggatggtaccccttagaaataataaattattttgcttttaaaaaattacttttctgtgagtgataattttgcagatcagatttttgcaagcttccccactttttctctattttaatgaaatccaaaaatagtggcaaggaattgagtccctcggaatataatttacgttcatttgtttttgtagatagcttatatatcgttacatggcccagtgagtattttgtttctctgggtaatttggggagagacttctactttcatagaaggttaaattacacatatcaagccataaactagcaaagatttactcagcactattagttactcttgggaagtgtttttaaatggtaactgttcatttttccttcagttttgaagttgctttagggaatttcacactcttgtgtgcacttgaaactccagattttatttggattctccaagtagataaagtgatttctatcactgtgtagaaaagggccttcttatctgtggttaaatgcagctgttttttagacagagcttgtttcgcccggcctacgtcacttttctataactgttttaatactacagaacttatgtgagatttctacagccggagtcgatttctgtcacagcctcgttttcccttccttacccttctactttgacagccacattcctagtgcaataaatcataataattaaggaacatgatccctgatatttaacaaattctctcttctccctgcttcatctcctacacaaatgtatagaactcatttatttttccttttccttaaaggagaatatacttcctttaactagaaccaatgtattcctcatccaaattcttgtggctccttttctatattactctgtggcacttagagttccttaaagttcataaatatctttttcttttactcctctactagctcttcttgtattttgcaccaggaccaaggctggcactttgcatatagcagaagcttagaatagaactttgttgttccttgataaacataattttatcctctgagtgagaaaaacatctaccctttgccatttagaaaattaaatcagaagtatgtgaatgcgatattttatgttttttgttattattactaatattattatwtttattttggggtactgttaacatgagggagaaccgtataatttataatgtatagaacatttttaagaacgtacctcaagcattattattgtaccaaaagattcctaaaatataaataatgcaataatgttccaaaatgtactcatacttttttagattatcagggtttttttcaaattaaattagatagaaaaaattaaacttaagcatttattaggttttagtgctatgcatataagaaataattaacaattgctcatctgtgtggtttgaattgaataattcctatttagatattattctcatttacggcacagagtaattcttattaaatgtaccagttgcagtaaagccacaaggtgttaaatgttctgggtgctaatggagattgggacaagatcccttggttatgtcagtttgtttttattttcttcctgttgttatcaagaaaacaaatctagctgctaaaattacaagtatctgtcctagtagatatgtagtccttttttagaacatttgtatgtgtttatttagaattagaaagtcagattgtgtattaatgagatgataaaggtactttttcatatgtagtaaatcaggcatataaagtttatttcctgaatttcattttagaacacagcgtagaagcgaatccttttttggaagtttcctaaattactgtattattgcttaactgagcccttttcttagtttttactacagttcctggtttgtaaatttaaaaagcccatgaaaatgttaattttgaaatgtttttggaaaagaaatgtctcttatacagtggttagtaggtggggaatttgcctagagatatgtgggggtttgagactttaggtttttttttaatgtaatatgtgggattatacaatgagagtgtaaattttaagtactcttaattctatactgtgacttgatgattatctaattaggtaatatgtgagaagttaatattttgtttcccaaagacaattgttttcctaacctttagaattctgaaaattataaaacatcaataaggttttatacagtttatattgttactatgcttttattttacacataaatcaaaattggctcctggctacactagaaattttactggctttttttttccctaaaagcagaatttttttttgttctaaaatgctaccttttgttgttgctctaaaatgatacttttatgcaattatatacgtgttataatgatgaccacttttagaaacatagggacatagatgttatttagtcatcttctaccttctgcccagtatgattagtcataacagtccacaattcattattgccattaggtgaaccagaacctgaaaataggttgttgcctttctagaattctttattcctttattttcaaacttggattttttgatctttaatctccctttacagtgttttatatcagtatcagatgttttattagctattatccacatgttctggccttgtttgatatctaaatttaaggtggtaatattctcttgttttccagtgttaattttcgtaaggataccttttataataaatgaaaataaatatttgaataaaattagtccaacagtcaactcttttgagagttctttgtggttcctctctgtgttattctccttttctaggtgtctttatccccttccaaaataaatgtccaaaattatccattcctcatcttaataggcaataggtaggggttagggactatkgcacatatttccaaatagaaataatatgtatctttgaatatatctactctgcctactgttgctactagtatatgtcaccaattaaaagtaactaatatttgataggtgcttttaaaataacatctccaatgtaattttgagtatttcaggtttccctctgctcctttcattcattcattccaccaacacttaatacctaccatgtgtgggtcactgtgcttagtgtcatgggagataactatatggttgatggtactggttaacggggagctcaaacattggtagaatgattaagacattatggaagacattgaagctaatgcattaaaatgatacagtattccttttgcggtgayacagttataaagtgctgatttaaggtgacagtgttttttcctggcccttttagttttaacgctttagtatttagtatacccttctgtaagaaaccacaaatttagatgagcaggtaattggaggaacatgattttaattcagaaaacttaaggatttctttaagtgtcaacttyctgtaaatatttgcttccaaatagttaataatgaagatgactggaaacagagaaaagtaaagtgtttgaaaactactttcaaaaggaaatcaatcagaaataaagtagaatttagtgaatttagtgctgtaccttgaagacaccatagaaaaactgtgatagggcaaatagactgtaaggtcagagggattgggttctattctgctttccaagtgtgtgtctatggctctagagtttttaatttactcactctcaaatggaaataaccataccctttccacaaggcatttgagaggattaagtgaaataatgtggtcagtatacctagtacagtttgtagcacacagtaacctttagaaaattagattcctactcctttgataattttttctgaaactttcaaatgtatctagaatggacacttacatacttttaagtactccagtgttccccttctctccacttaaatgtccttattrtccaagctctgtcccagctgcctttggataaaataacctrtagattgtcttgtaatctataaagcatataatttaattaattcagttggagcttggccttcccctctcttcacccagtgtcacatttaataaataaatttgtctaaattagcagcttataaattcagaaatacattcttgagatatatgcccatttttaaacacgtgttgattaaaaattaatatctggctgaaaataatgccatatatggaattccataaaccccatccagtgaagaacaagaaagatggaggattagtgtaattctttgtatctacatttaagttttagggttgtagagtttctcattattcttgatcagtacccccgtctctcagtataacttttttccaaatactgtgtttggccaggattttaacaatctttatgtggtaggttgttatttggagatgcctcaataaaccgtcccttttattactcatgcccttgtctagccccctgccacactgactctgggcttagcctgggactgctttgaataaaataaggcrcaagtgatactctgtcctwttcaggacacgcccctgagttggcctggcagctgctagtttctttttttgtaattcttcttggaacccagctgccatgtcataaggcagcccaagcagccatgtgacgaggtccacatgaagaactgaggcccctagccaacagacccacctgagttcgtatggaagcttcttaatgattctaactattcacacgtcccagacaatttaaccccatctgagttcccgatccatctttagggtgacatcagccatcctagcaccgtagctcataccacatagagctgaagacctgcccaggtaattcactgctgttggggtggtttgttatgtagtaatagataactgaaatacctgattaaaagaaaatataactcaatgcttattatctattgggcaagaaagattccatctttttttcagctttattactgaaaatgattcgttgatagttacttggaagaataagtgaggattttaaaatatcttcccaaatgtatttacgtctttagatatgttcagttcttttgaatttatatcttacaatttaagtattttcccccttgaaatgcaaaaacataattttatgtgcatcttttggggtcatggtattgtgggaaaaagcaggaacttgaagctagaagatctgattttaagtttcagctgttattagccatgtgttcatggcaaattttatcatatctctgagttctcaatttttttagcctaaaaaaatgaagaatttgggccatgtgagctctaaagtacctttcgactctaacatttcaagattataatatattttgttacttatttttcagcagagttagtagcaattacccataatgcagaattgaatttcctaagtgactgtatcctcacactggatagaacactcatggcatctgcagtgaagtttatgtagagcccttttcccctttaagaaaggaagtgttagcattacctgggggtacatatctggctctctatggcctatagtgacctttatcaccctccattcttgccaaatcttggtagataaaaggtcataccagttttaaatttccaacttttatggatcctagctcagatgctacttgggattacaagaaggtcaaaatgcagtaagtctgcrttagggaactcttcaaatacttcaggttcaattatatatctaatcaagtcacttcttcggagtacgtcttgctgagcaatgcatatcttactgtagtgccaaaatcccttagagcaagttttcttgcctccttatgttgggatatattgtataaaatctttatgcttatgtatattcattttgtaccaataaggacttgaaaatgtcttttttatttttcattagggaattgcttctacgaaaacaatctctattttgtcaagcatgacatttctactggtaagggtaattagtaccaatgccaagtgcgctgttttctctgctggagaaatgaatttttagtagaaggggaccgaccacagtgctaaaaagcagcaagaygataaaacttagttgtccatttacctctatttagccactctcctagctttgaattgtcctgccttcctatccagaagcacaagtttcctgctgttttccactttagactgctcaagggaccggaagggagttggtactaaatcctttggccgtgagtgtgagtcattattaaaaatttagaagccaaattacaaatatgayacttcagcatctgtttttaaaattgttagaatcgaagtttaaagtgttctttctgcctttacaagtaaaccgaactttacattagtagagtggattacaactacagcagtagctggaaaaacacccatgtcacagaggggcaaaggaaaaagagcaggaagaaacacacaagatagcttctgtggtattgccgatgtcccagttctccaactgaatggatgctggatgatgttttaatatatgctttataacttacatgtttctatggattaaatattacatgataaagatattttaaaatatctctgtaatgattatgatttgagtaccctttggtttgaacagactgttcagttaatatcatttgacagtagagtattctacaaaaagttatttaagtaaaagactatattgtgtaaaaaaaggcttgtttaggtgcaaacagaagtctgatttcaggaaattcttccagcctgatgagaaatggcaaaaagaaagtgatgagttaattatggatttaagaattctgaaattatctgtaactttgaattgacattattaaaacaattgtttggccacaatataaaaccaatgtaaactatttcttaattcattgtataccatttctagtgtcttagtcagctaggattgccataccattgacagggtagcttcaacaacagaaatttatttctcacagttctaaaggctgggaagtccaaggtttaggttccagcatggtcagatggtctgtttctggtgagcaagttttttttcttttcttttctttttttcttttgagacagagtcttgcactgtcgcccaggctggagtgcagtggcacaatctcagctcactgcaagctccgcctcctgggttctagcgattctcctgcctcagcctcctgagtagctgagattacaggtgcccgccaccayacccagctaattttttgtatttttagtagagatggcgtttcactatgttggtcaagctgggctggaagtcctgacctcaggtgatccacccacctcggcctcccaaagtactgggattacaggcgtgagccactgttcccggcccagcaagttttttcatgtctgtacttagaagggcactaatcttatcatgaggttcccacccttatgacctcatccaaaccatattacctcacaaagaccctgtctccaaatgctatcatattgggggttggggcttcaacataaattttaggggaatactaagcattcagtcaataaacctggttattttttctttatcactgcctttttttycttttattaaagagattatcactcaagcttgcttctctgtctcacacatatgcatattaatccattcactcatctcattcagttaaattaggattgtgttatgaaaacaaatttctagaagtatcaaaaatcttcatattattctgccttttaaaagaatgttttcagtgactaatttaaagaaatgtttttctctactaagaatgccatcaagagtaaagcttcaagaaagcactgtaaatactatgcataatcacttgaaatgcatatttggataactaaactggtaaatttggaaayagaccaattctaaatataaaatgttttatattttgattttataaaaaaaatgctttaatttgttaatagtaacataataccctacttttgaatattataaaaatgctccataaaataatmtactttcagacagtgttcaatacccattagaattgggagagaaggctgtgggcagggaacagaactagacgtctctgctcctggctgtttttggctgccacattcattatagaaatgcagaaacaacaaagactttatcacttaaggaactttgaggtgacagcatatctgcagaatcctagagctcttagccacattaaaatcagctgaaggaatttgtcactttcccagtttgcagttaaaatgactatctaatgatctaaggtggaccgattccctcctatgtaattattaaatgccgatcagtgcaagtggtttcttctttcaagaagacctctatctgttgtccattacgtagaatctttgatgcttagatatgaaaacctaagattgaaaatattagttacaaaaaggaatttatgtgcagtttgggtagtgtgaaaatttttctcctttcatgaagtgtgaaacatcaagttacatcagaccaagaaacctttgatttttttcttttcataaaatctaccagctatttctcattcgatgatgaaaacctaatgttgcaccttgagagtactcagcatttttgttcacacaaatcttgtgagagcatgctagaaactcattttcaccacacgttttaattcttctgctgattctgaggctggaaaagagaaacacaaattgctggccgctgaaaaatccccttgaagattccacaatgataatgtgacgttaaaattgaattaagttggcattcagagctttattctcacaaagattaccctatggatttcttgttcaatcttatctgctcttctcccttcccttctctttctcttcttaatacatacatttaaaataaagatagtcctttatattctcactttaaaaataaatttttggccaagcatggtggctcacgcctgtaatcccagcactttgggagaccgaggcgggtggatcatttgagttcaggagtttgagaccagcctggccaacatggtaaaaccctgcttctactaaaaatgtaaaaattagctgggtggcaggcacctatagtcctagctacacgggaggctgaggcaggagaatcatttgaacctgggaataaatgtaagtaagtaaataaataaataaataaataatgtttactatttgtggcaacttgaattacagaaaccttgttttatatttcataaattctttagctgttaaaatgccttcctaaagatgagtacttccattactttggaagaacatcctttctgaggctatgaaatatcaattgctattttatctctgttcatgtaatctatctaggattcatagaatcttacttggatggggacttaatggcaactagttcaacctcccaatgcagtgttagaaccttcgctatgacagctctgacaggttctgcttaagagagagagagctcgcttgtttagatcagaccatatttggatttagtgctcaatttagggtgtcacattttaagaagggatgttgaccaaccagagtgtaaccaagaaggtagtcagaaaattcttctctaataagcagttgaagtaactgcaggggagtttagttcaagaagagaccaagtgactgtctgttagagatatctagaaaaatcctgcactgggaaggaggcagaatcaattattctttccaatttcaatattgttattcttttttgtcctgctatattaaactatttttaggcagcttctgttatgaaggagttccacatttctggggcgcttatccaatggaacagtcacactgtcattattgatagagtttaatgtctactgacctatggatcagaatgctaaagttgtcagaaccaaggagatccctgcctgccaagagtaattcttgcccctcagctatattagtccatttctgaacatcctatctagaacctgagcccccacacaaaggaaaattagaaatgcagaatgagagtttctaagtcagactgcctggatttgactcctgactctgcttttaacttgccgtgttaatcaccctgttccttagttccctcatttgttgtgtggaagtaatagtgtttctagctaaggtagttgctgtataaacaagttaatacatataatgcacttagaaaagtgcttagtacatagaaaatgcccaaattttagctgttatttttaataaaatattggtatttaaaattttttgtatatgctatgtcattttattttatttagtcattgcttatgttttctattttctacatcttgcactggacactggcttagactcagtacagattgaagatcttttatcaaagtcaaaataatttatttgatatatagagagccacactccagctaatgaattattgttgttcattttacagcatctcagatataaaaaatttggttgcatcctacatgtcttttttttctatcttgttcctcctgtcccttcctctgattcttgttgtcccccctacttttattttaggttcaggagtgggtacatttacaggtttgttgcttgggtaaattgtgcgttactgaggcttggcttacgaatgatcccatcaccaaggtagtgagcataatacccaacgggtagccatccggccaactcccctctcaagcagtccccggtgcctgttttcccatcgttgtgttcaggtgtattcactgtttagctccctcttataagtgagaacctgtgtttggtttgttgttcctgcattagttcacttaggataatggcttccagctgcatccatgtcgctgtaaaggttctgtgtcattttaaccagaagacaactttgtgaggaagtcagcactgttgtcacccatctcccccattacaaaaaccgtgaattaaagacattaatatgttaaacagccttaggttttaggagtagtatcatgccatgatccactgtgatgagactatatctgtcgttagatgcgtttagctctaagaacagtgcttgaaagaaccgctgaccaagaggtccaggaccagagagaaagactcgtaatgggagagaaaacatacggctannnnnnnnnnnnnnnnnnnnccaaaagttaagtaacttcaatgagagtgcctgatcttcattatggtactacttaaaaatccctttgaaagacagcattagcaatgaaatatatttatttccatggactcatgcctatatcgattctctagctgttaatttgtttagggttctcatctaaatatcactctctcaaagagctactaagctcgttgcttcttagtttcttagcagattaatcatgtctctgtgcctgatagaaatttaataaagctaattatgtgtttattgtattttcctaagaattccattttaatggctaatgtaatattttatttttagaagggaaacttattgatcttaaccaaatgatagatcaaatgaaatatgttttgataagacagagcaaaagtagaacattactaaataattatggtacagccacacaatggaaatactgtacagctcttacaaagaataagacagacagatatgtactaatattaagaggaaagaagctaatcatagaagaatataataacattcctatttgtgtgggaaaaaacagcaacaaaaagaactcagagagaaaacaaatacatgttcatatacatggaaaaatatctgaaatgatcattgtgcaactgtaaatagtgattacatttgggaagagggcttgtttggctggagggaaaaaataataaacgtttatattatagtattttctctactgtttgaatttttagagggaatgtggtaattttataatttaaaaaggagttattggggagaggatggtgaataaatgtaaagtaactgatattgagactggttaaactgagaaaatacatatacaatactttatttgtgaagccagacctggacacagaaagatgcaggaagttaaaaaaaattacaaggatgatatgtagaacacatgagttcagagaggtagtacttaagaaaactgattacaaaactgatggtacattgaacaatcttactactaaaagtagagtacaatatgtcacctgatagcatatgcacacgcacacacaattttctcattctggacagatccagaaacaaagaaactgatttacattgcctggctaaggtagggtgaccaaccgtcttagtttgctgagatcaatgggtttcctaggatcaggaaagtactgggcaaatcaggacaagtcagtcatggtaatctagaaagtcccaaaggagttggtctaggccaaactggttcttcatcttacagaaaaacaaaatacactgtatgtcacagtttagagggctctctgaggacttacagcttcacagttgtgattttattcttccttaggaaatgcatcgaacatcacacatgcttgtattgaagtgtcagtgtaaatttgtcacacaaatttaaattcaccatgtcggattatccttgtcctctcttgacctttagaaatgtaaatcaaaagctgacaataactctcattcattcttttttttaaaaaataccctattatatgtaaggtgctttgttaagcctttaaaacataaaattaaggaatgttctcttttctcagtgaactcacagtgagttaggagacagatacacaagtaaataactattattttggaacatgtgtaagagtaaaagatcgtggcaagtgttttcaggaccagtcttttttctttcaaaaagtattgtccaggcccggcatggtggctcacacctgtaatcccagcactttgggaggccaaggcaggtggatcacttgaggtcaggagttcacgaccagcctgaccaacatggtgaaactccgcctctactaaaaatacaaaaattagccgggtgtggtggtgggcgcctgtagtcccagctgcttgggaggctgaggcaggagaattgcttgaacttaggaggcggaggctgcagtgagccgagatcaccccactgcgctccagcctgggcaacagagcgagactccgtctcaaaaaaaaaaaaaaaaagatattgtccaaagacagaacaagaagaaaacaggtaattatatggaacattggtattttggaatctcatttaaaaattttgttcaataataataatagtcctaagaaattaaaaatatttatattttatgcttttagatgaaaggtgagctagatgctaggctattctgtctagatggtagttataacttgaaaaacttccccagcattatcagagcaaggaaaccttttcttatgtacccagcagtcatttgtgagataacaacatatattttatattaaaatgtaaatgctaaaattccatttggattaagtatgtgataatacatctagacatactgatagttgtcatgattttattgctcagtggggaaatcaaaagatgtagtcattaaatttttgtrttccaggcacataacagtatataggtcttccaaagcagatagctacattatgaatccataagaacttttaattctaatattaatccttaggaagattttaccttccatcattgtttggatttattaagaagwtatgtatgaaattaaatattcatattttgttactracttaattttttcagaagttactttaattctcagtggttctagctaactgataattgtggcatttgagttgcatgaagtggagtggagtgaagaaaggggagaggaaaaggtgaagttggaaagttgtgggrtgggatgtagtcagggagattgcttatggccttctagaacattttaaacacttcagtttcttcttagagtgagatgaagacccactggaagattttgagcacaagatttgtatacctaacttaggttttaacaggattactctgctgtcatgttgtgttactctaaggggattatactggaagcaaggagacctagtagaaggctgttgccactagccagctgagagaggatactgtcttcaagtaggtgacagtagatgtggtgagaagtgattggattctggatatattttggaggcatagtctccaagagaaatagtctgatgggttgagcatagtgtgtgggaaaaagatgggaatgaagaaagactcccaaagtttttggcctgagtaactaaaaggatggcgttgtcattaacaagaaattctgcagcatatgtttcaagggaagcactagggggagctccattttagacaggagaaaagcatgagaagtcttacatatatcatgtagtgatgtcacataggcagttggattatagcatatgactatatgtcatttactccatatagtaaccagtaacctccacagtatggaagttagcaaagaggactaggttggagatataactggggagttgtcagttcatgggtgctatttaaagctacaagactgcatgagctcaccaaaggaatgagttagacaatgtagaaaagaggtttaaggacagacttttggagtactccaatgtcaagagaatgaaaaccaaccagcaaggactgagaaggggtaaccagctagggaggaggaaaataaggagtgtggtgaactagatgccaaggaagaaaacattttaaggaggaagaagtgatcatcgataccaaataatgctaataaggtcagataagataaggactgataaatgaccactaagaaataacatgaggaagttctagctagagcagtcaggcaagaaaaagaaataaaaggcatctggatagggaaaaaaaacaagtcaaactacctctcttcactgacactatgattttattctaagtataaaaaaccgtaaagacaccaccaaaaggctgctagaactgataaacgattttagcaaggtttcagtatacaaaatccatgtacaaaaatcagtggcatttctatacaccatgagcatccaggctgagagtcaaatcaagatctcaatcccatttacagtagccacaaataaaatgaaatagctggggatatagctatcccagagagatgaaagatctctacaaggaaaactataaaacactgctgaaagaaatcagagatgatacaaacaaatggaataatattccatgctcatggattggaagaatcagtatcattaaagtggccatactgcccaaagcagtttacaggttcagtgctattcctatccaacaatcaacatcattcttcaaaaaattagaaaaaactattctaaaaatcatatggaaccaaagaacagcccaagtagccaaagcaatcctaagcaaaaaacaaagccagaggcgtcacactacccaaattcaaactatactgtcaggctacaataaagaaaacagcatggcactgatacaaaaaacagacacgtagactgatggaatggaataggaagctcagaaattaagccacatacctataatcatctgatcttccacaagtccaacgaaaasaattaatggggaaaggattccctatgcaagaaatagtgctgggatagttggctagccatatgcagaagaatgaaatgggacccttacctttcctcatatacaaaagttaactcaatatggattaagaatttaattataaaacctaaaactataaaaattctagagaaaaacctaggaaataccatcctcagcatcagccttagcagagaatttttggctaagtctccaaaagcagttgtaataaaaataaaaactgacaagtgggacctaattaaagagcttctgcacagcaaaagaaactaccagcagagtaaatagacaatctacagaatgggagaaaatactcataaactatgcatctgacaaaggtctaatatccaggatctataaggarcttaattcaaagcaaaaaycagtcccatcaaaaagtaggcaaaggacatgaacagacatttttcaaaataagacatacaagcagccaacaaacatgaaaaaatgcttatcattactaatcatcagagaaaygcaaatcacaaccacaatgagatactgtctcacaccactcagaatggctgttattaaaaagtcaaaagacaatagatactgacaaatttgcagagaaaaagcaatgcttatacactgtggaatgcagtttggaaatttctcaacttaaaacagagctaccattaggcccagcaatcccattactagatctatacacaaaggaaaatagattatcataccaaaaagatacatgaagttgtatgttcattgccatgccattcacaatagcgaagacatggaatcaacctaggtgcctatcagtggtggattggataaagaaaatgtggtacatatacaccatggaataccacacagccctgaaaaagaatgaagtcatgccctttgcagcaatatgaatggagccagaggccattaacctaaacgaattaatgtaggaacagaaaactacatatcacatgttctcacttataagtgggatctaaacattgagcacatgtggacataaacatgggaacagtagacattgcagactactagagcgggcagcacaggttcaagaacaaactacctattgggtaccatgctcactacttgactgcagtatacccatgtaacaaacctgcacatggccccctgtatctaaaagttaaattttaaaatgaaaaaaaaaaaaaaaaaaaagcttacgtatataagcaacttaataagatgatgataaataataactatcatttgttgagtttttccaatgtgataaataccgtattatgtactttgtacagttatctttaatctgtaaaacattcctgtgtgatagggattacacttcccacttcacagatgttggaagcccggacgcagagacgttaataaattaacacaaatacctagtaaaatttccaaagccrgaatgcaaaaccaggatttaaaagcctttattcatttttgcatgccatgcttcctggacttacgttgaagccacagctttgcaaaaggcttatcagttgtcactattttagctatgccttacatgcatggttgtataggaaaaattaaaactaccttaaatgctttatactgcaccgcaaatctatatgataaaaggcaaagatagacaaatgcaagtttgttttttcttatagcctgaatccaagaagacatctttaatttataggacttccttaagacctttttttctgttaacattttatgatatgaagatatcagtgataagatttatcttacagcagaataatatttagatagcttttgtatttgcgtctgttccataatttactttacatgtttgtcttttaaaatgatcctaacagaaacgtctgtttttagaataaatcagaggtgtagaaactggcagtgattgctgtgctgtgtatgtggatgtcctaaatgtttgatgcttgtgtttactagtttacaaccatcatcaaattacgtagcaacatgtgtattttagaaatggggctgccttatttatctaaaacaaatgatactctgttaattatcctagcaattagaaaattacttttaccattgctttgccatttggcagttgagatataaatttggcactatgtggtaaccattcactaggtttagtcctagggtatgtgatttttttgctttggatcaggagacagcatttggtaaatagcagttgtaaatttcttttttcccaaagtttgaaaaacctcagggcttttagtggcatgagtttgcgcaaatcatccttttttttctcaatttgtctgttctttttctctttgcagtctgccattttctcaaatttattgcatgcattttatttatttctatgtgccttctagtgatgctatataagttgcaggattagcattcacatgggaatgatgacttggaaagtctcacccagcttgttctgcactcacccttcttgtgaattcaccactctcatagctcagctactcctacttagatgctgctgccactttgctgacagcgtcatcatttctctcttggattagtcctgtacccttctgttcaggccttcctgccatagagtttgctctctctcttcagctttattctccacttagtaactaaagtgatctttccaagactctaatcttaagtaattttctgcttcaagtctttcagtgatttctcattattcttaggctctccccagtctcatacactacacttagccactgaatttttcttaagtttctcaaatataccttgtccactgaatattaacatggattcttcacacaacctggaatagtttcttattcttttgcctcagtgattctgtttatccaaagtctcagctcagaaagcgtttcttctgagaatcttccctggccccgtttccctctgcttgcctctagagtggtttagaccagcatcctccagccttcccgggtgtcctgaactccccttccatgggatttgtccacatccacagcatttatattgtattgcctgctttctctagtgacttgactccttaaaatgtagacttctgtttcctcatcttttgtccttctgaataaagaattcatttatatgcatttcctttagagaatcaaacttggtgtgattttgagaaagaagaagatccataagctcaaaatactgatttcgctttccttgttttcattgctatccctagcacttaacgtggtgtcagatacgtggtagaaattcacatattttaggtgaatgctagtgatgaccagatttttgttttagccttaacctcttctgaattctagtgccatacgtgtaagtctctctctctgacattaccactggggtatcatctaggcactttaaattcagtaaacccagacctcacattatttccctctgggctctcctttcccttccactcccttcttttttttttctgttgttcttctgtcattggcatttccaacctggaaactactctatctctcactagctagatcagtcatttctcagaggctatcaattctgcttcctaatagtttttgaaaactcacccttcaactccattttttcaccgacttcctgtcactttctaccttaattacagagcctgctaatttatttgagttatataaatttcagtagtttaaaaactaaatatattactgttttcaaagcattgtaaatcttacaattaaatgattttttaaaatctgaaaactagttaaatttttcttatgttttgcccccctttttttttttttgagacggagtcttgctttgtcgcccaggctgcagtgcagtggccccatctctgctcactgcaagctctgcctcctgtgttcataccattctcctgcctcagcctcccaagtcgctgggactacaggtgcccgccaccacacctggctaattttttgtatttttagtagagacacacagggtttcatcgtgttagccaggatggtctcgatctcctgacttcgtgatccgcccgcctcagcctcccaaagtgctgggattacaggcgtgagccaccatgcccgacctgcccttttaaataaactgtaggttttcatatgcattcattcatttgagaacttttgttcattttcaggaataagaaataaaagttactgaatgaactttatacaaagaaagttgtgtaaaagataatacgaaaatggagcatctttttgttcataagcaagaaagatgtgaccctttttatgtaatattaaatattagctatgtgctatactagcttgctgacttactgaccagtcctccaaagcagtccttgtctgtggaggaagttttcaaactgcaatgaaaagtccaattcagtcatgaaagaatccaagatagaataagagggactagatttaccttgcttcctgaaactctgagaaaaatagacaaaatgtatgaaacagtggttttcagacattgagcatcaggcagtacatggtaattatccctgagagagggtaacaactccaacttaccgcctccaaagaatttccaggccttaacacaaggaggggaaaaccaggaggaacctgatggtctccctgagttgaggagatgaaattgggagtttggggagactaaggtggaaggagttagcaaggcagtgggccaggaaagggagatacacacaggggccccttacagtgttcagataagtactgagtaacacatgggtgaggaractgcttgaggctagtaaaagaaccacacggaaagatgagaggtaacaagcctaggaactcacacagagtctgtaatagtttctgttgccaccagccatagtaaaaagccctcataattcactgggtgtcatcaaaggacaatgcctcagtagtaggggaaaatctgtcctacactaaaggctgctctggccctgcctaccaaagcctagaagcaagctttgaaattaacctaatatttgtgtaattgaagtccctagtgggaataattccctagtgagagtaataggagagggagcagaaaaaatatttgatgaaatcatagctaaaaattttccaaatttagtgaaaactatataggtctaagaagcactgcaagctccaattgtgggcatgcatgcgtgtgcgtgcacacacacacacacacatacacacacgaagaaaactataccaaggcacatcataatcaaattgctttaagtcagtgaaatattaatgtagaggaaatattagcgtatccacaggggaaaaaacacatgtacaaaggaacaaagataagggtaacagatttctagtcttgaaacaaagcaagacagaggacagtggtataacattcttaaaatattaaaggaaggaaaaaagttaactaaacttcattatccagcagaagtattcttctaaaatgagagtgaagagtcctgaaagtaagttgatactccctgacagtatcatttgcagtagcatttgacatggatctcagagcagaaacttagctggacatgtttgatgataaaaaattttagttgcctatttttacatggcattttacattttaaaaaagcacagtggctcacgcctgtaatcccagcattttgggaggtggaggcgggtggatcacttgaggtcaggagttccagacaagtctggccaacatggtgaaacctcagctcaagtgaaaatacaaaaattagctgggtatggtggtgcgcgcctgtaatcccaaatactcgggaggctgagacaggagaatcacttgaacccgggaggcggaggtggcagtgagccgagatcaagcgactgcactccagcctgggcaacagagtgagattccatccaaaaaacaaacaaacaaaaaagaaacaaaaatgtgtttctgtatgggtgaaaactttacagtagttttcccttatcctcgggagataacgtttcaggagcccggtagatgcctgaagcctcggatagtaccaaaccctatatatggttttttgatctcataactgagatggctacttaatttgtagcatcttcagtgtggatatgctggaggaagggatgattcccatccaaggtggcacaaagtgggcagatttcatcaggctacttagaatagtgctcagcttaaaacttatcaattgtttgtttctggaattccacaagtaatattttcagactaaaattaaccacaggtaagtgaaattgtactgtattttcacaggtttttcagatagcgaggatgagtgattttatctccattttatacatgaagaagctgagacacacgagtagcatgacttccactgggttgcataataagttccaggaatgtagtcaggtttcctgacttcctgttcaggactcttctaatctgaatggtctcctcgttgatagctgtgcattgctcaaaatattttctaaacttagagactgacagaatatgtaaaatgtatgaaatatctcaaaagcaatagtagtacagtgtttagtacttcttttgtatcttcacatctggaataggtgaagcaaataaattaaaaatcttattaaatctcaagaccccaaatagaagacaggaaaaatgaaagggaatgcattaaagtatattaaagcctgtatgaaaaacccgttatggtatttaaactttaaattagcaaaggtggaaaattgctatggttgcagagaagtttttaattaaagtgaagttatttctgattcttaaaaggtgagaagtttgattattttaattaccatactaaattttagtagagaaccttctaataacttgactcaaattacaatgtggcagaaattagctgggaagaaactgtattcctctcttgtctttacactgtgtatgtggtacataaaatggaagaattaaatgctaccttggtatacatcattgcacccagtgtagcaaattagttttgaccattactagccgccgtacagaatgaataaggcccattgtcctttttgtttccattaaagtttgttcaaattgttctttagggatgtttttcaatctttcctattaaagaaattttgagagctagatctttagataaagttttatggtagaattgggatttgaaggttagaaattgaaaggaggacaggatttaagtaggataaggaagaatgtttccaattataggaaacatgagccctggtgtgtcttctcagaacagtgagaatgtttcatgttggaaagaaataggaaatcatgtagaataggtagggtaaggtttgattactgatggccttaaaaaaacaagtaagtgaaataggtggatggcactaaagttagtattgactcctgagggcagtaaattatctctccttaagttatgaaatgtgaatttttgacatttcagcgcagtatttttgtgtcaactttcattgtgtttaaatctgaaatggcaaagcaaggattttctttgtttgtttgtttttacctgaaaaggggatgtttttcttttctagtcgactcctttacatctagcagcgggctacaacagagttcgaatagttcagcttcttcttcagcatggtgctgatgttcatgcaaaagacaaagggtaggtctatcagtttacttcctgtcagtgctttgttttttgtctgatactctaaacttttaaaacactagacaaagtcatatgtcccatttgttacggcttacataacgttttaagaatgttcataactctggtttgaggctttattttcatgtacctacttaattaaggatacttctcataataatttcccaaatcaatttaattttatcaccgttctgttacttgaagttgaaattgtgtctcagttgcagttagggtttttcaactcttaaattgcattttagaaaaataaaacaaattgaaaattatgaaaatccagtagcatagctatcagattcaacagatagtaaaggatcatcctttattgataaaccaaaatcataagtatacaataccaaattttttttctggtgaaatcttggacatctaaactgagaaaacctagaaggttgatgtgaggggatatgggtggtaactaaaaaagcagttatgtcatttattttaccagtaggtcatttttgaaaactttgtatcagtttcctgtaaagtctccagagatatacgatcattgggtttgctgtcctatgtggtggactaacatttctcattgccccactttaagatctgaaagataattaaccctactacccaggtaaggtagattatgttacagtcttgtgactgacagcataaagaagagatgcccctagaggagagtttctttcactttgtccctccccaagtcaagaaacataaaaatgaactcaatgcttgagacacttaccagaagaattttccatttccaatctgctttttctggtgctgttctcttgcctgcaccaggttttgtgccatatgtgaatggtgtcccagtagtataggggcataaatgcctgatgctcttgtacatctctatttccttgtgcatgtctgaaaacagatgggtgtacaataggtgagtcatcaagagatgtacaccacaaaaaaagggtttttttggtttatttagaatactttgatatgcaagttataatagtttggatatttgattattttgctagaaattaccattaaagtgaattaaaatggtggaatatttcagttcactaccaattaacatttatttcttgtaaatacttaatatataatgcatgcatttgtcaattagcatatgatcttcctttcgccaaaatgttcttctatttggtatttttttcattatcttcaaggattatatacaaaaaacaagataaatacaaaaggtgtgaacataagctatgctttgaattcttttattattttattaaatacttttaaatattttaaaataattgtattgggatttattggattttatttcttagtacgacatggataaataagttgtttgaaatttaagtattttaatttgcctcttttcatttagtggacttgtgcctcttcataatgcatgttcatatggacattatgaagtcacagaactgctactaaaggtaagagaaattcagaatattgagcatcatttacttttttttttttctttaccttgtcatgactttccatactttcggcctcatgaaagtttgtttagttctttggggttttttgtttgtttgttttgagacagggtcttgccctgtcacccaggctggagtgcagtggcacattcacagctcactgcagcctcaacctcccaagttcaagtgatcctccccctcagcctccccagtagctgggattacaggggtgtgccaccacgcacagctaatttttatgttttttgtagagacgaggttttgccatgttgcccagtcttgtttttttagattttaagagaataaaatacgtttttaaacatattaccattgccttaaaatttttaaaacattgaatttaatttcagctgtttttgaaaggtgatattgaagaaattaaaacacttatttgaacaagttataactgaaatttacaaagaaataaatgtcttttgagttttatttgatccagcaaaatgattactgacctaaaatgttttttttctcaattcagcatggagcttgtgttaatgccatggatctctggcagtttactccactgcacgaggctgcttccaagaaccgtgtagaagtctgctctttgttacttagycatggcgctgatcctacrttagtcaactgccatggcaaaagtgctgtggatatggctccaactccrgagcttagggagagattgacttgtaygtatttatatcccgaaatcattatcrcataaattggaatatttaatttctgttgagttttatctaccttaaataataaccttccattcytacaagcagactaattcataatcctcatttctaattgtatacttttcttcatgaattccatgggaatgttatatacagacactttttgtatatattgtatttattcgagcctagttttaattcgtatgttgaagctccttttttggttttttgaaggctaatgaggatgagtcaatcagcatccatttcttggatacttgcaatgtggcaggcactagaaatatagcagtgtacaaaccattaaaaagctctgagcttctggggcttacattcttgtgctattgacagtgataggtatctagcattattgaaacctcttacgggcttacgttcttgtgccattgacagtgacaggtatctagcattattgagccctccccatttcccgagccctgcaaggctgcacaatcatatttttatttgtcatgtgtgttatgacccaagtataatcactttcccatatttaagtgagattttaaaaataattaggttgaggtcatcttctgaatatattaccaatatatacatgcaaatgttttttaaataaactttttgtttcagcatagttaaagatataaaaatattggattctcattcatgcaattaatttagatacagcttttcaaaaaatctctcacctggttatgaaaataataagctattaattgttctttgaaaaattttcaagctctgcatttctcccatattttagtcctttccttttctgtgtcaagacctaatcaccattgatattttggtaaatatttctgtaaatgttttctataccattacttatggtgwacttatggtggcaatagtagtagcaagagtagtgacaataccaaaaataatgcatcagcctgtcctttcttttttgaattttcatgtaccactgtatactttcatgtcagtgtatgtagacctatctcttgtttaagagctagaaagtgttacagcatatgtgcrcacaaattatttaactggtttccttttggtggacatttaggtttcctgtttcaaaattttgctgcaataagtatctttataggtgtatctttatgactctgagagtgtgaaacagtcttatttcagagcatacatacttcacattaatctacatcctcatcttttgcatttttatcatcatattatcacattgctgctgttgttaaaatagagaaattcataaaataataatattcctacttatttataatcatgctgaagatttttatacatttttacatctttttttatgtcaaccattgtttcattgacagatgaatttaaaggtcattctttactacaagcagccagagaagcagacttagctaaagttaaaaaaacactcgctctggaaatcattaatttcaaacaaccgcagtctcatgaaacagcactggtaagattttattgttaatctattccctgtgtctataataataacgtaagcacaaaatatgattttcatttcagaaaccttaaagtaactttagtatctgaaatgccaggaatttgcatgttaattttggttgcattgatttttaaacttagtttggggggtgattcttttcatgggtgagagaattgacatttgctcaacctcaatttggaaattattttacctttgtcttccccacctcattataacaaatccacttttgtggccagtgctttcataaactacaagatatgatttttcaatagaatttttttttcttatgtttgctagataaatactagatttccttctgtagaagattaaagtatatttttagatatttgcattatctttttgagcaattgtattcaaagaactgattatattcatggtagaaaaatggcaagatcatgaattttttgtttgatactatacaaattattcttaaaactatccactttttttcttcaaatgcactttcggaaagatttatttattttctttgtcattgacacattaaggctcagctagagagtggttagtgatcgctcctaaattcagaatttaagcatatgtgatgcctgcatcacagaccttaaatatacctaattaatattcttacgtatatttgacacaaaagatcaaacctttgtcagtatctgcataaaacaacattaaaggattgaccaaactgaaataggctaactatatgtacacttaaatacatgtctctcaaactagggttgagatagattcaagctacacggtgttatgctaggagatattcatagccacagaataaacctgacccacttttttggagttttcattttatttagttgaaagtagttttttatttttaaattttaatacgaatattaaaatgaagcagaataaaaaagttgtataaatattatgttaaaacctaaaatttctgagaatatttttctctaaactgcttcagttctatcattttcttgcttatccttgggcatataaacgtctcctgtagtgctgggagtacctctgtagaagagcttagaaatactgacttgtgtggctgatggcctaatgaaagattgagtaacttagttatagatttctgtagcgttgcagaggcatacgtattatgatgctctccatggaatatatagtgaatatttattgattggctaagccaaaagaaataagatctctcttaatgtttaagagcataatttcaccttggtttaaacgcttacgttttgtatttccactatacgtagaaagaatatggatcatctctgtgatataaaacatatacatatgttctgatactctgagataacaatgttttaaatggtcagcagatactgttcaattccaagagctactgtacatatggaagtgtattttattaacttggttttgtttactttatagcactgtgctgtggcctctctgcatcccaaacgtaaacaagtgacagaattgttacttagaaaaggagcaaatgttaatgaaaaaaataaagagtaagtataattgcagaaggagttgttcagttcctaaagaggaaatgcaataaaagagagacaattaccttttctttctttcctcttttctgtagtttcatgactcccctgcatgttgcagccgaaagagcccataatgatgtmatggaagttctgcataagcatggcgccaaggtgaggcacacacctgagcagagtgccagactcagcactgagcagccagctgctcttaacactgcttctctctctccgatttttctgaagaaactaattttataaaggactattagttcgtacttaaattcatggattctcctataaagctgatttagatcttgtttctaataaaaataattacccgtgtttcttgatcctttaatgtcacccttctgtaaagcaacaaaatatagctatagtcatttgaaatagatttcatctttacattattttcagttaatactatacggatatattttgatagtgtccatttgaataacagtttatcagaaaataaattatgttaaatgatagcatcagaatagctctacttattctaaaaaacatttgtggccaggcacagtggctcacgcctgtaatcccagcactttgggaggccgaggcaggtggatcacgaggtcaggagatggagaccatcctggctaagacggtgaaaccccgtctctactaaaaatacaaaaaattagccgggcgtggtggcgggtgcctgtagtcccagctacccaggaggctgaggcaggagaatggcatgaacctgggaggcgaagcttgcagtgagctgagattgcgccactacactccagcctgggagacagagtgagaatctgtctcaaaaaaaaaaattgtatgccttcagatttgtaataattttctcaacctctacactaaagaaatatgacatatttaataatttttactggcattttctgaatggtgtagtctgaaactttgtcaagcacttaagagaggaaagaagcaaactggttgttttttagaggtgacttgaaattatagattttttcattctcaagaatgtatatttcaaagcagttgtctccaaagtagggtatagactcccyatggagcatacaagatgccctgttggaaaaatcctagcatttcaatttataatacttttatttaagaataaggaaattcagatttaccaatattgaatacaaagatgatgccagcactctcactaggtccacgtgtcagccattgtgactcgtgatgtcaaggtttcctgaggtaagagtgggacttgttagtatcgagggattgacagtggcaaactcacttgtttgttccctttcagcatattttggcatagtggactttacttgtgtccaaatgagttgaatttatggatattatcctaaatggtagaacttttataaatatcatacttgatcagagtagtgaccctgacaagggacacagggagtgaccctgacatgcttttatagcgtaaaaaggtggtctggttattttgtgaagtagtattttaaggtgttgtcatagttgtgttctttttaatgaaaataaaagggttcaaaatttgttaatagttctctgaggacaaatgaccatgacttgcatgtagataccctttaaaaaggaaacataatcagatccttaaaggtaaaagttacacactttaggtaaatgataaaataactgcttttttaaaagaaactttaaaaaatgaagagaacgttttgaacatagatttttagaaaatgttcacttttctgtgattttgctgaaaaatgatataaatgaatcacccagccgtcatatctacataatttaaacacataaaaacagaattttctcacctgttcaaaagccttccttaatttggttttagggtagattttgaatctattcaaaacattgtaatgcagcacttcctaataacttcgcaagaacatcagtaaagatggaattttactacagaatttcaatgaaagccttagcataattagtaaattacattaaaattaggcattctgattgagtaggcatagttaacaatgcatttatttcattggctccatgaatctgtatgaaatctttgcaactaatatagccattcaaactaattatcaaaaatgaacttagagccacgtgtagtggcccgtaatcactcctgtaatcccagagctttaggaggcaaaggcagaaggattgcttgaggccaggagttcgacaccagcctgggcaacacagcaagacactatctctacaaaaaatttaaaaattagccagtcgtggtggtgtgcacctatagtcctagcgactcgggaggctgaggcaggaagatcacttgatcccaggagtttgaggctgcagtgaggtatgatcataccactgtactgcagcctgggcaacagagcaagactctgtctctaaagaaaaatgaaatgaacctaaaattaaaccctcaaattcctaatatcacaatttttataagtttttttaaatgtttaaactacagtcaatggatattttctagcataagtaattaaaatatgttttggacaggtaccatagcctatgccttaatcccagcactttgggagactgaggtgggaggatcgcttgagcccaggattttgagatcagctgggcaacacaggccaaccccgtctctacaaataataaaaaaaaatagccagatgtggtggtgcattcctgtagtcccagctactcgggaggctgaggtgggaaaatcacttgagcccaagaggtcgaggctgtagtgagctgtaatcatgccactacactgtagcctgggtgacagagcagtactctatctcagaaaataataatcatgaaatctttttaaatttttaattatttcatctctttctcatccttcataaattctctttgtgtaagttttataatagtgtagcacttcttggttataatttacaaagaaattcatatatatatattaagtgttctcaaaacttttctacctggagggtgtgtgatttaaaaatttggatatcactgccttaaaatggcactttatgtttttaatttatgaaatgaagacaaagtggaataaaagggaacagagttctacagatgtattacctattttgtaggtacaactactgcattattatataagtagcatcttgttgctctttcaagcagaaaacactaagctaagtgacatttctgctacacttaggagctttgtacatttatctttgacccgtttttgcaaatatctaatgacatttataatgctcttgaaaaattaggaataatgcccttcattttgggaaaatagtatctatttattgtctcccatcaggcattttagtttataaaggttcaatggaaaataacattatgacttgttctagtcagcctttctctaggtctgtggttctcactctttatttgccctttatgtgcacartacattttcatcagtaacatcttagttcattactagccctgtcaatgacttagaagaacttctagacttttgtgttcatcctagtctttccactgtagttcatctacattgataacgcttgctagtaggcacttaaaaaagaggagagttatatttaatcagagttatgaacccatagatatcaattgctatcagtagatatcaaatgccgtagcaactcctatttaccccatcccaaggcaggatgctgttcctcatggttggtgtatctggtgattaatgtgttgtaaaaaactccctgtaagaaactcacttagctattgttgggctcccattttttcttgtgtagtatttctttctgaggaactcatggtttctgtatgattttcaggcaactcatggtttccatttgattctgaacacaccttctgaacaagcagcaccagtttttaattaggattcagccctcttccactgcttctagcaccctgctgccttcccctactcttgatgaatcaatttctcaggcaaaggcagaagaatttgggatgaagacctaattatcattaagtaatttgccttactttgacagaacttagtggtatttttataagccaaaacattcttttgcccaaaacctggtaatacatacaaacttgaggtttgctgttaatgttaaactaaatgtacgccatatataacctagacaggcatgcttttgagtttagaatcctccactttctagttttgtgaccttgggctaaatttccctgagtctcagttgactaatcagtgatatgtgaagcaaccgccctacaggcttttttttttttaatcaaatgagcatatgtatataaatatgtagtatagtgcttaacacacagataatgttttggttatttgtgaatatgagccttttttcccacatttgtcttttcaaatgtgtatgtactatgtatttccctttaattatctaaattttataagacacatatctaatccctttataattgggtttgatccactaactccataaatattggcatgcaaaataatcaagactgtagtagatactgtggaaaataccagtttgaaagttaatgcagttaccaaacttgacctcagtcctgaatcaatttagcagcattagtaatgaagaaggaagaggaagataaaagccacttatgaaggagtaattatattacctggaaatgaattgggtgttagagtggacttagagaatggtggtgcaattaatggaagtaagaaagctacagagaaacactggtttcctacgccttgataatgattttctacttgaagttgatattacagaaagacatttaataaaaccagcagttggaaagacagcatcagagtataaaagagtttaagattagaaagatctactgagaattcacatagtgattctacattttaggagcaagtacggtccctggtagagaaagcatggaaagaagggagttaaggaaagatcctttgaggattgcccatgtttatagagcggtggtgggaagagaaagctggaagttctatcacagtgtctacagagtacaggaggagtatgaagaaggagcaggtgaccagtgccactgagagaaatcaaggcagactggggcattacttagaccgtttttatatgagggctttggtagtttttgaaggagagattctaaggagatagaagcagagatatatctcagttagggtcttcgcaataaatggcacacttaaagtgggtaatttgatgaaagtttaataaaggaactgtatagaaacgtgggcaaggttcaaggaaagtagcaaggaaagaggttgtactagcagcagggggggcgggtatgatcatctctggtctgaagggacaaggcaaaggagaggttcttggtgctggaagatggtagctgtatggaaaaggccacctggtaccacctgtagcctttgatcaaaggatgtatctaatgttactcttcattgtcctgctgtcctctatctcctcccagtaccccccatctcctccnnnnnnnnnnnnnnnnnnnnnnnnnnnnnnnnnnnnnnnnnnnnnnnnnnnnnnnnnnnnnnnnnnnnnnnnnnnnnnnnnnnnnnnnnnnnnnnnnnnnnnnnnnnnnnnnnnnnnnnnnnnnnnnnnnnnnnnnnnnnnnnnnnnnnnnnnnnnnnnnnnnnnnnnnnnnnnnnnnnnnnnnnnnnnnnnnnnnnnnnnnnnnnnnnnnnnnnnnnnnnnnnnnnnnnnnnnnnnnnnnnnnnnnnnnnnnnnnnntggagcattacccaattcatttgaaaaatcctcattaactaggagtaaacttttgttccttaaaaaaaatcaataatttattatcccctgctttttgggagtactataaagtctaaataggaaagacatgaagactttatccttcatgtggcaattttttctttattatggttagtctgccctggcattctgcattctgtcagtaatgaattgtctgctctcattattaagaaaacttacgccccaactgcatatggtattcaagaagtttaattcataaatgcatttcttcatatataaagcatagctattttgtcattatgtgcatctgttaaatacgtgaaacatgaaggaatttttttgacagttcatattcatatgtcttaatttgacagatttatttacattgtgtttaagaagatattgtgacataataattgacatttaataggcttatttctcacatttagaagcgatcacgagtctttgctcacttggggaaatgtgtcagcccattataagagttttattaatgcttttctagaggtagattgataagtagattgttagcgcaaagatgttaaagtacttttaaagatactatagctctaaagtatcttttacagtgtaaataatatctgaggtttgatcataccaaaataaagtccaaaggggcaagtgtcccagagacattttagttctcagtaasaaaccaactcaatctagattaaacacaaatggaaatatattttatactaatataaatgtatattaatgcaaatgtgtttattacttctgtgagaaacccgtatggttatctcccagaaatatgtgtaagaattgtagctgagattcacaaaagaccagaacaaggaatttagaaactatcaggtactttggctgccgttctctatgtctctccctccctgcttccctctttcccctcttctgtgtctccgtcgctccctgtctttctctctctttctctttctctgaggtttcttttctctgccagtgtttgttcatctgsttcattcttctttctgcagactggatttttctgtattatttctctatggcctaaatgtggtcttttacaacccatactttatgtgtccttggcttagaagtataccacctgcagctgatagggtctgtcccgtctctgggatgaaaaagggagaattataaataagactcgcttgttgagtacgagcattcattggattggcaccctctagtctataatcacttttgctcagtttgttatttcttaaggcacgtgagcaagattagtaccccttgaaaccaccaaagataatctgttgtattataatatatatatatatatatatatatatatatatatattttcagggaatttgattgtttcttttaaatttccacaggaatctttacagatagcacactcaagttcagctagcaaatagaaatccagttccgtactctgtagtgagttcacaacacattaaaggattaaaaaacatttcaagtaaaatattgattactatgtcagtattctattgaaaaattgtgttcatttgtctctttcattcctcataggaagkgctttaactatgcataccaccaaggataatgatgaatacttgtaaaacacctgtaaaaacattagaatcaatttaaattatattttgattacagataaagcaaattcattttcaatattaagcaattctataaacactggcatttacccttctccctcaatttccagggaaagaggaatgcattttggttagatagcgaacattttagtagttcctaatgtttgttcaatatacagaacagtatgtcaaaagtagtattttttatcaccagaatttattagtttgttgctcttgtgagkcattcacttaccaaccattttcaaatatctgtttatacaaggcatggtacttactgctgagaggatgtataaagtttgaatttgatcaagatccttctcttaaggaacttaaaatctaattgtctaacacagtctacttgactactatatgaactggaaagtagtatatataataagagaagtatagatkgatttatattcwgaggaataaacagttatttctgttggtggtggcagcctggggaagagattggagaaatctcatgaagaaaatagaatttcagctaggaatgttcaggaatcaaatatatagatatatacaggcaaaatacaaacaatacattttcagtaaggactgaaaatcagggaagtaaaggggtttgtttgttaaacagtcagaagttatgattagttagtccaaaaggtacagaaaatggaaacaatgaaaagcaagatctttgtattgtcaattggagagtttaaactttgttctcataatacttggagaacctatcatttgttcttctatcatagatatattaatgcctgttaatttttttaattgttgactttcaatttgttatggtttgagaaaaaatatgcagtgtcactctagctaaagagtacagactgttttcaactctcggcttacttgaaatcagcttttaggttgaggcaaacacatgttcacagttaaaggtgttaagtacggatgtcacagaacagtttgtgattaattaccaaatgagtgatgtagacaatgatagctttaagtttaggagaagtggcctcaggattagctgtctgagactaggctgttcacactgagtagaatattgaaggattcccctcagccatttccttgtggtctgcttgccggtttccagaactgttttggcattttttgaatcataatttcatgtcctaaatatttcgggccaagtgtcattgtgattttatatagttttactgagttattcatcttctgtaaagtcatttttgctactcaggtagaaatgaaaatacgtacactaaggttgcaatctctagatacaaggaaaagtgggaatatgttttacctctaaaactgccagacatctattattctgactcctgaatggataggtcaagccagtcttaagcatttaattaccacagttgaggggtaacattaaatgtaggagtctctttatttgagacagtttctgtaacctggtgaaaataatcactttagtgctgaatgttaagtattttttagtgacatcaaatcatgttcccatgcttcaataagttggattgggagttcccattactataatagaataagttagtatgtttcttacccagtttccagaaaaatgttaatgattagaatgttcacaattttagatttttcttttgtgctgaagaagtaacaaagaaatcaaaattcaagttagtttggtagcttgtgttatccattgatacatgctaatggctgtgcttttttgttggtatgtatcagcagtcatttttcttctggcaaatgtgatagagttaaatatgttactatttcatgggagttttgtgaaagaccatcaagaatttgtatgaaccctttcctgagtaagtacaacagccttactggtaatgataaaagactggcgacagggagactagttgtcttttatcctttcttttcttaatcttgtatttagtgggtgtacacaaatattttcaataatcaaccagcatataattgagaatttactgtgtacctttagcaggagctttctagaggacccagaaagtctgtgtgtaacatgcactcatattctcaataaccttagtttaactcaataaacaaaaattaccccagtattatattttataagacagtwaagtgctaaattgacatagatgttcagaaaaggagtaatcaaagtcttcaagaaatcaaggaagacttcttggagatgaggagacttatttacactggatctcaggagccataaaggcagaaagaagggtttctctgaaaagagcagcaagcacaatgaacgtggacttgggtctgactggagtagagggtgctgattgggatctgctggaagataagatgagtcaggtttgaccagattaagaacatgatgccagtgtttcacattgtcttaagcagtctcacaactagctaaatgattcttcttcctgtgtataataactcttcaaagctttaaaaaggaatgtttgaatcctcaaatcttttttttgcttaaatatgcttgtaattcaattaagatattataattagctatattacctaaattagaaaagaaatataatcaactactttgacagtctttgcttacatatgctgttgtctttatattctggggaaaagtttggtaaaaatccattcattcagaagaatttggtgagcatcctcattgtggcaagcagtaaataccagaccagagttgctgcctccatagaccagtctagtcgtcgaagggagtagcagaaatgggaaatggtcaggaaaatggtcattccgggaagaaagggtatgttgtaattttcagtaaggtgatcagagaarggtaactaaaaagaagatagttcttcagaatcagtgagcaaaagtttataatcaatatctatgagactttttaaaagctttgaaagttgattttttttttmataagaatgtattttctaaggtataaaaggaaactaaacaagatgctcaattccatgtgcccacgcaatgatttttcagatgaatgcactggacacccttggtcagactgctttgcatagagccgccctagcaggycacctgcagacctgccgcctcctgctgagttacggctctgacccctccatcatctccttacaaggcttcacagcagcacagatgggcaatgaagcagtgcagcagattctgagtggtgagttaaaatagaccaacagggcattttatgttttctcttccatccctgctgaaatacacagacaaactttgcagtgtttactttgcctgaagtttttctcatgtcttttcttgcaatttagcctgtggacttccccatctcccttttttggtagggtaaggtaggtgtcattggaaggaagcagatacagcttttartttttttaggtttaaattgaaaacctgactcatgagtgttctgatcaaaggtgacttaaaactcatataaacagtgtggaattatggtagctataaaatctatcaaatagagaaaattataaatcattcatatggtagtgacatttaattaattgttcctacctgtgtaaaattctgacatacttttaaaattcttaacttcattgcattattataaaattatcttgtctttttctggcttaaatataattataggctgggcacagtggctcactgctgtaatcccaatactttgggatgccgaggcaggcagatcacgaggacaggagatcgagaccatcttggccaacatggtgaaaccctgtctctattaaaaatacaaaaattagctgggcggagtggcgcatgccttgtagccctagctacttgggaggctgaggcaaggagaattgcttgaacgcgggaggcggaggttgcagtgagccgagatcacgccactgcactccagcctggagacagagtgaaactctgtctcaaaaataaataaataaattatatatatatatatatatatatatatatatataaaattataaaattttgctgaatgtttcattgtctgcctggtatagtgttagatattttaaatataaattgataagaaaatagatactggcttcctaagtcccaaaactagaggaagtaatgcagtctacctactgacaaaatgaactagaatcaaaagtgtagtataattaacctctttcctaaccttttaattttgtctgtggattatatctgctatggaatgaaatgacaaaccagaagagtaaaatgtagaagtcctggttacttttttctacctacagtctggtagttcttaactctatcaggtacagtgcccgctttttataaagaatgtcttatgacatatccttatgacatttcagaagtgaaattcatagataatatgacctaactgtataggtacattcccaaaaatctatataaaacgccctaactagatcgggcttggtggctgacgcctgtaatcccagcacgttgggaggccgaggtgggcggatcacgaggtcaggagttccagaccaccttggccaacttggtgaaacccccatctctactaaatgttaaaaaattagccgggtgtggtggtgcgtgcctgtaattccagctactcgggagcctgaggcaggagaatcactggaacctaggagacggaggttgcagtgagccaagatcgcgccactgcactccatccagcctgggtgacagagcgagactccatctcaacaaaaaaaaaaaaagaaagaaaaaaatgccctaactataatataaagggaaaatagcagtaagttacaataaaataatttatagttcttatgtaaatagattggacacgactatattagaagacaaaacatgaccccacagatttctaaagggaccccaagaaatacagcccagttgagaatcactgctatatgatgcaacagggacccttctagggcttgtagagattatgatatgtgtatattgttataggaagatcagagctaaatagcataataaaactaattgtgcaacattgtgaaaactattgatgaggatttattttcctcatgctaggtcattcgtagatagtgatcattctacttcagccttaatggtgatcttgagacgggaagatttagaaggaaatctatcyagcatgtcttcactrtcaacatgagtaagatccagctgaacaaatgaaattttctatataaatttcaagcttgaactcaaaaaaaaagactttgacttcctgtttttatggagtgatagaacatttgcttaaaggagatattactccttgcctaggaaatatttcttccctctcagtaaattctaatgatttctaaaagttgtgatttttgttaaaatttctaaattttctcattttactgagaatcatttagtaccgaattttaagttagtttctgtatgttttaaccataagtcaggcaaacacatagctttgcctcaaattatgtgcatagcttttagagataattaacaaaatggagaagaaagtattgaataaatcaagcatatcagatccatataatacttttaaaatgtcttcttactgaatgcagttagaatatatgagttctggcaaaagataaaactactgaatacaaatgaaatatttttyttcgattattttgataaatctcctttaaaattgatttttgaaataagacattatataggtaattaaatgcttaatttagaacatgcagaactttttatttaattctttattgatctggaaagctaatacaaataaaaaatatatataggaaaattttgccctccaaaaggttttttttttttttgtaatgggaattgtttcttatttgaaataggatataagtttttaaactactatttttaccaggaatttgtatgtctctgtagactatggaccatgcattagctgaacttttagttatttattaacccaatatcaggttatatctataatgacttttgaaagaatatattaatatcactcaaataagatgtatagtaatttgttttgttctggataacattttataagattcatttaaatacacttgttaatactgggcttgagatctactttagaaacctgcactttcaactcccaagtctgtagttgccagaagtttacattaataaagttttcattataaactgctggcaatatttgtgtcaaaactaacatcaatgtaaagaaaacaagasaagcagctttttatgaattagcactttaaaacattatttccaaagatttgatttctttctctagacttgctctttccaatatggtagccactagctacatctggctacatttaaactaattaaaattaaataaaatggaaaatctttccattagttacactagccacatttcaggtattcagtagtcacacgtggctaatggctagcataatagcacaaataacactatttctagcaccacagacagttcttttggycatttcttttaagttcgatcttgacctgaattcttgcgattgtataacccagtgtgggataagcattactttyatctacacaggtaaagattaggcttatgatasctaaattaaacattgaaaccccatttacagtggcacattgaaataagccattaagacctgttgccagtccagtagtctaatattgatcaaactactaagtctataaaagatgtttttaaaaataggctgcttcctagcgtttctaactttttaaaaactctaatgagccagaaaaagattggagacaaaataagaagcccatctttaatctttgattctaggtgactataatttcatgttctacaggctgagtgtggttgctcacgcctataatccctgcactttgggaggcaacggtgggaggattgcttgagctcaggagttcaagcccagyttgggcaacatggcgaaaccccgtctctacttaaaaatttttaaaaattagccgggtatggtggtgcatgcctatggtcccaactactcaggaggctaagacaagaggatcacttgagcccaggatttcaagaccagccagggcaacatagtgagaccccatctctaaaaagaaagaactaaacaaataaataaatttcatgttatacaaacctagcatacttacaaagaattttactaatatagtactttgcatacaagctactctttcactcatgttccttttttaatttcattttttatatctcttttaattgtgcatcactttatacaaagttcctgggctgtatgtaagtcatttcagctaatacatttttcgcattatttctaaaaacaagtctatcctaggccttattcaagatatgtaataggtgcaggtctctacaatctgtatagtaattaaccaatattttaaacatctttactttctcctctttaaccaggactaataattcttttctcatagttccagaagcattcttatatttgcttaagactttttgcttgattggaaaattatactctttagtagacagtccgcatcaagatatgtgttccaatttcaaatagttcttagatttcaaaaattttgccatattaaatgtatccttaaagtgctgtcatcgaaaaatactcagttataactatatacataaacaattgtctctattttgttgaaatgaaaaactaaaaatattacctgtagatattgaaaggatatatcagtgaattttgtcaaatccagaatcactgtcatagagacataatatacacacagcatcttacctataaatgcggtagtgtatgtgcacacttataatggagactaatgagacaatgaaagaacagaataagagcagccaaaaaaagagccaagatttgatagactcattgaccccaatacatagtggaaatccatccaggaaatgcttttggaatgctctctgtgtgaaaaggaatataaagatgagcaagatctggttcctttcctcaacatttccacaaattaaaatgtaatataactcttaagaataataattcaaagatttactttgttatatgaaacactctcttttttcctcccttaatctcagcattttacctgctattatgatcaaataagtagtttatcttttactgaagaattgtcataacttattctgtaaaagccactctctcctgaaatctacaacctcttcatagcatcacttgatcctcccacttggacattgggctcaaaaaagatgtctctgatcataagataatacaatcttagatctgaaagattttcagcactcactttataagggcaaaaactaaactgttacatgagttgtccaaagttgtagattatagagcccagtctaaaatgtaggcctcctggagatccatccttttgtgttaacataatgtgtgctcattctaaaagccacacttcatgtacataaacatacttttggttgacatattataaattgttttctttaaaaacttattttatttgggtcaatgtgaaatgaattttcagtttatttacattggattaatcaaaataataactcatttgttagcctctaracctaacagcccaatttaattatattctgtttcgcattgctatcatacctccaattatacaaacattgaaagttgcattttcctaaagccattcaataaatgtgaattaaacaaatgtctgtatttagtagcccttttctgttcactgattatacttcacaagatgattctgatttyaaaagtagtacattgagactaaaagaaaaatcaaggctgggcrcagtggctcacatctgtaatcccagcactttgggaggctgaagcaggaggatcacttgagcccaggagtttgtgaccagcctgggcaacatggtgaaaccccatctccacaaaatatacaaaaactagctgggcgtggtggtgtacacgtgtggtctcagctacttggggctgaggtggggaggattgcttgatcctggaaggttgaggctacagtgaactgtgatcacgccactgcactgcagycttggtgacagagcaactgtctcaaaaaataaatacatacatatgtacatacataaaaaaagtaaacattaagtactgaaagttgtgtggcttccctaggtttgtataacaaatctatggcaaagttttgctacaacatttagtaaaaccaaactaaataatttttcctcctgaactactttgcaatccctcaagaaccatttttgtttccaaaatcaatgcagttggaatatatgagtttggatatatatatgagttctttccttccttttatgcagagagtacacctatacgtacttctgatgttgattatcgactcttagaggcatctaaagctggagacttggaaactgtgaaggtaagtcagtgcccttaatatctggaatagcactgttgaactttgctaaccaattcatttttaagcttctaagtatatctactcaaatacaaacagtaaaaaggatgaacagagtcatgggcaggaaaaatctgtactactattaaggaattcccagtatgtgccttgtatttatgaaaccatttgtatatatatgtgtgtgtatgtatataggtagatggacagatggatatatacatacacacacacacatatacatggtttttagtaatttttcttcaggttacatgaaagctcttttaatttcacttatattaattacagtgttactatttttggctgcattcacaaaatgtataaactagatcgagcccagacattagcaggatgacatttgaaagaatatttcttgatcttttctcagaggttcacacatttattctaggaaagcattcctgtgatccctcaacagtggaattattcatatgcagaagatagattttttccctgtgtagctctacttgcttcaaaaattttatcagtctgtatttgtggtatagaaacaatggttgtagttttattttttttcaaatatagtcatattctaatactaagtatrcttttttaaaacacacatttcccatctataatcattcacttagggatgaagttagcaaaagttttttgtttggaggttggtcttttggggtttgttttttgttgttttttacgagacaaggtcttgctgtattgcccaggcaggcctcaaactcctggggctcaagcaatcctcttgccttaccctgcctactatccaagtagctgagactacaggtgtgcaccactgcacccagctttgcctttattatttttatcgaaaagttaatagcaaatttgctattgacactcagtactttttacgacatactgtcaactttgtcacctcttcttaagcaaactttttgygatttttagcaaactaattttagcattcttgataacatatactggttgaaagtgacggtaaacacgttttaagctctgttgcctagaaattttatttttgttttaatatgtgggcacttccaggatcacatccaacttacgatagcatctaagttatttaaagaataatagtaaattttagttgtgatagccactagggagaaatttttatgttgtcttaaatctaaaactgtacattttttcttaaaaatgcttcatcacttgaaatgtattctaataaaagaaatttcttaaatataagacgattaggcttcctttcagagcatgatcatctcagtgcttgaattgctatatgtgcttattataattaatacatactttatttttaaagcatacagttttaaattccatgtgttttgtatatgataagcagatgtatactacagcttttaggtttcttaaacaatccattcacagtgaaggcctaatttattttgatctgtggaatggaagtagcaaaagaaaacaaagcagcacaaattgagtgagaattaggcctggtaaatttcttccccaagagactttagaaagtagtagaactgaggttttagaagaaaaggctgcctgctgaataaagcatttgaaattgtgaaaagtaagtaggaaggatgtgaaattgctttgccattcgaaagaaaactgaaacagaataaagaatttctaaatcttaaaaatcaaatatttaataagcaggatgggcttctatttctgtagcctcacaaaatgagttgtgtttcattccctacctattcctattttgtcagtattctgacaaatagaataataatagagttaatttagaatgwaagaaccagtgggggaaagcagcattaggaagaagcttcaatcatgtcagactccttagagggtgtttattatcaatttttgcatcttttctttttgatttatgtatttattcattttttatttaatttgatttgtcaattatgctrtttatatattaatatagccacagactcatttgtcatgaaaagatatttgacctggtcacattacaatggctcttcagattttagaggctggtgcatttccgtatagagttgatgaaactgtgaactcgcctttactgcccagactccttcctgtcatgtgaaaattacaccacttaaaaagcgcttgtttttatcctacctgtgtgaaagcttcttgtcttagtctatttgtgctgctataaaaaaataccatagactsggcaatttctaagcaatagaaatttatttctctcagttctggaggctaggaagtccaagatccaggtactcgtaggcttagtgtctggtggggaccccgtctctctgccttcaaggtggtgtcttgttgctgcctcttctggaggggacaaatgctgtatcctcacttggcagaaggcggaagggcaaaacggccaaatgctgtgtgaagcctcttttagaaaggccttaagcccccattcaggagggaagagtccgcatgacccagtcacctccttaacactattgcattggagattaagtttcaacatgaattccagaaggacacaaacattcaacccgtagcactcctacttcctctatcagtagaaatttttcargttcttaatttttatgtaataatagcttattactgtgacggaagtggcagcaaaattagtgaatacctgaaaatccccagggaccctgcaatcgtcctttatagcctagagcatgctattgtctgctctgcttcatttgctttttctgtttttcattgcctttcttctgatcacttccctcaagttggataattaggaaagtaagcgatgatgcatgatgtagcagaaagactaagaggttaaaaatcagtaaagcagggtttgagtctttattctaccccttaccaactgtttgacaaggataactcacttaaccttcatccctgatttatttatctgtaaagttaatttataaattaatctccatccctggtttgttatctatcaacttcttagacatataataatttcctcactgaaagaatattatattcttttttttttttttttttttttgagatggggtctcactctgtcaccaggctaaagtgcagtagcgtgatttcggctcactgcaacctctgcctcctgggttcaagcaattctcctgcctcagcctcccagcgagtagctgggactacaggcacgcgccaccatgcccagctaatttttgtatttttagtagagatgaggtttcactatgttggccaggatggtctcgatctcttgacctcgtgatctgcctgccttggcctcccaaagtgctgggattgcaggcgtgagccaatgcacctggccaatattctttataaactgtaaattattattcagatattatcattactcacttattaccaccagtgatacagtctttcattccttccatgccatcctgctgctttgtaaacaaacggagcttacaatttagattgtgctgaaattgaagcattcagagagagataaggagacatagaagagatttggaggacatctctgaaagagatggaagtaaagcccaaaaactagggtatgattaaaaaccagtttaacttgtaaaggtaagcaaatgttgccccaaaaggcaagtaaagcactgttgacgacgtaactttgctacagtcaatcaaaagacccagggagtggcccaggcagaaaaataattttccagaccctttttgcttgcttgactcacattagagacggcaagagctctctagttacacagtcaactgaggttggtgttggcacaagcagatacgctatgacaaacagtagagcatatctcagggaggaaagacttacaaagataaaacagcaaggsattakttgctttggaaatgcttgctttattgtgggtttttctatttgattccgattttggttgggaaatgttgaaaaacattaatttgctctgtacataataaaaaatatttgtcgtcactgaaaggcatagtgctgatttctaaacatttgtattgtctaatctttggaaataaatattcattagacaattataatttacttatccaagatgttgaactattttggggcaaaacctgtgaataaagagtaatgttcgttttgtgtttgtctttgtgtrtgcaccacgaaagcaactttgcagctctcaaaatgtgaattgtagagacttagagggccggcattccacgcccttacacttcgcagcaggctacaaccgcgtgtctgttgtagagtacctgctacaccacggtgccgatgtccatgccaaagacaaggggtacgtgttagaagttagctgtttgggagtcattctcttcatgcttaaaaaatttaaaatatttttgaagtcttagattttttctgtattaaaaaagtaatcgttattttttgtttaaaacataaattaaaacatagaaatgtgccaggcatggtggctcacgcctgtaatcccagcactttgggaggcgaaggcgggcagatcacctgagatcaggagtttgagaccagcctgaccaacatgggtgaaactctgtctctattaaaaatacaaaattagccaggcgtggtggcacatgcctgtaatcccagctacttgggaggctgaggcaggagaatcacttgaacccgggaggtggaggttgcagtgagctaagatctcagcattgcactccagcctgggcaacaagagcgaaattccatctcaaaaaaaaaaaaaaaaaaaaaaacatagaaatgtacagtatagaaattgaaaatttcctgtcagcccacctcctgctcagagatacagcattcaaatgttgaccttattcctccagatattgtaaatgcatagacttgtgtgtgtgctgtggcgatggtggtggtggtgatttttaacacaaatggtggtgccattctatatggtctgctttgcagtttacttttttccactcagtagtgtatcttgaatagtcttcccatatcagtacttaatagtctcattcttttaatgcttgtatatagtattttattacattatatgaattttgttttgttttgtttttgagacagagtctcgctctgtcgcccaggctggagtgcagtggcacaatctcggctcactgcaagctctgcctcccaggttcacgccattctcctgcctcagcctcccgaatagctgggactacaggcgcccgtcaccacgcccggctaattttttgtatttttaggagagacggggtttcactgtgttagccaggatggtctcaatctcctgacctcatggatccacccgcctcggcctcccaaagtgctgggattacaggcgtgagccactgcacccagccctatatgaatgtttttatatagtctgtaagttattgtttattcttcttttttgctattaaaaatgtacagtctcttctaaaaagaagtcatccatcccaaagacatcagtattcctagaagcatagttttatttttactaattcagatactgtatgttttatattagtttgctaaattattttgtctaggcaaagcttaaggcagctacttagaaatgtgagaaaggtattttaactgatattaattcccgtgttctgagttaatttcacatcatctcaaaataagccagtagctttctgtgtaattacatacaagtgcacagtagaattaaactgcacgatttaggcctcatcgaaccattatgtatttatttatcttttaaaagggacacatcagacatgaatatttcaaactgtttcagtgcattggagagcaatcagcatttgcttctattgctcattttaacagttagcatatttcatcccaaaactaaaaaaaaaaaaaaaaaatgcacttgwtactttgcttctgccatgtgttaacttcaacattttattcttttgatgtactcttttgtgggagcatctttttgtccttttagaatgtcagctgcttacaaatcagagcttagactcctctcagaatagtttgcccatttctcatctgagtagaacttatagttgacatcgtcatttttcttactgaatacttctctgaattacctggattatgaattttcaatatttggcacctcaatatttacacctgtgcatggaaatcaccactgaatcaccactatgattaaaccactatgatttaatcaccactatgatttacacaactttttaccaaggtagaacttgcctaaataagctaattgtattatattttttataagtaagcatacaattttcattagcgaaactcataaagataaggattgctgtgagtatatatccatccccaagaaacttaggaaaaaatctttacattgaaagaacatttttgaaattattactccttatttagaaatggataactatatcttaaagaacagaggtgggtgtatttctttttgcgcagtgttcagtatagtcagtamcatagaagaatggtaggatttttattataagaatcattgtaactcaaaggtttgwtttatgactttaaaataactttcttttgtttagtggcttggtgccccttcataatgcctgttcatatggacactatgaggtggctgagcttttagtaaggcatggggcttctgtcaatgtggcggacttatggaaatttacccctctccatgaagcagcagctaaaggaaagtatgaaatctgcaagmtccttttaaaagtatgtagtttaaaaagttatgaaatataactaattttatttatattttggttattacttgaaagtaagttggggtatgttattctattaagaacaatactgctgtagagmctgctctcattttctatttcccagaagaccgtttatgtgatatgacacatagctttgcgtagtgcctaaagtgaatatctgaaatggtttaagtccatgtcataaaaattcatcaaagtaggttttagaaagagctgaaatagtttgcattgcttgtctagtacttatagtattaatatcagaaaaaactgtacaggagaaacaagcttttcaatcaagttgggttttttttctttgttggctattttattattgttaactaactcattcactagtaaacatcaaatattgtgtctttaagaacttattgtagtatcagatttttattaaaayataagatgatctctaaagttgttcatatagattttagatacatgtaaaagagtgaaaactagtagttatatgaaactaactataatttatgctcacttaaagtatatttttaaaaaacgaccagatgtgtatttatgagattttcttttgcttttttttaactacggaaaaaaaattgaagtgtttaaataaaattcttctcccttcacttttatgatatcaaatacattcttatgaatcttgagaaaaacacaatatctgatactcatttttattatcactggttggtaagaaataacttccaagtcattgtgaatccattgtccaccttgacttacaactaatttccgcagtgagcccatgacagtctgtggccgacccataataaaaattattgacttctatttactttatttaatagctattggtaattaaacttttaaaatctataatttttaatacatttatatctaatttcatgatagatgttaagacttaggataaaaatcttaaaaatattaccaaactttattcttactgatggcctttagaattaagtccttttttaccagtgtgtcttactctcttctttttcatacctactgagtatctttatgtaattgaatctggtcaaaattaacatccatgctattcttcaaagtaaaataggtttccaaagacaacttggagtctgagaaaaagtgtattatataggttgtctcaaagatacttaacactctccctactttatcatcaccattgatcctgaagctttgactgtatagtattaatagttagaaagctgatccattatattactaagtaggaattttgcaaagtgtttttcaaaatgcatatagagtagatatcttccccagaggaacaaaggtagagtaaattaattacctacctacctacctacctacttactacagaaaatacaaaccccatttggtttttcttctttgtagcatggagcagatccaactaaaaagaacagagatggaaatacmcctttggatttggtaaaggaaggagacacagatattcaggacttactgagaggggatgctgctttgttggatgctgccaagaagggctgcctggcaagagtgcagaagctctgtaccccagagaatatcaactgcagagacacccagggcagaaattcaacccctctgcacctggcaggtaagcgcccccagtgcctccaagcctccttttcctttctcggacacctaatacagtttactaaaagacgaaagccatgctgaacacaaatgggactacttagtaaaatgctcttgattgacatagttttgtataatttcttattgtgaagtccctccattatgtgataacagtattagcttttgaagcaaaaagtattaaaaccttaacattttctggtccttattacatatgtatgtattttttttcctttaagctgacacgtttcctgtattttttttactctaaatagcaggctataataacctggaartagctgaatatcttctagagcatggagctgatgttaatgcccaggacaagggtggtttaattcctcttcataatgcggcatcttatggggtaagcatactaacattaaaatctagaaaactgaccgcacgcggtggctcacgcctgtaawcccagcactttaggaggccgaggmaggtagatcacgaggtcaggaggtcgagacaatcctggcwaacacggtgaaaccccstctctactaaaaatacaaaaaattagacgggcatagtggcgggcacctgtagtcccagctactcgggaggctgaggcaggagaatggcatgaacccgggaggcggagcttgcagtgagcccagatcgcgccactgcactccagcytgggtgacagagcgagactctgactmaaaataaataaataaataaataaaataaaatctagaaaacttccctggcatttacgactttattaaatgcatactatgcattaagtaagtagatatctaactaatagcatgatttagcataattttaatcttttgttcagagttttggtgtatcttcccagctaagcttaactaccttttggccaacagtcatgctttttattgctttttggtctcagcacgttatcaagcacaataataggcatgtaatgggtgctcagtttatatttatcaatattgtaatatatatataatataaaataatataataaataccaatttcttaattctacctcaagtatattttaaaaactagaaaagctgtgcagctgttatacaggcatggaaagtatgttggcttacatttatcatcagcaccttaaaaatattcgagtaggaggcacagtggcatgcgcctgtaatcccagccattcgggaggctgaggtgggaagatcgcttgagcccaggagttcaaggccaccctgatcaacatagtgagacctcatctaaaaaaaaaaaaaaaaaaaaaaaattaaatggttgagcagttgatatatatggtttcagagagtaggaattactagctaaaacctccaggtgaaagtccagagttttggacatgaagtccttgcccacgcctatgtcctgaatggtaatgcctaggttttcttctagggtttttatggttttaggtttaacgtttaaatctttaatccatcttgaattgatttttgtataaggtgtaaggaagggatccagtttcagctttctacatatggctagccagttttcccagcaccatttattaaatagggaatcctttccccattgcttgtttttctcaggtttgtcaaagatcagatagttgtagatatgcggcattatttctgagggctctgttctgttccattgatctatatctctgttttggtaccagtaccatgctgttttggttactgtagccttgtagtatagtttgaagtcaggtagtgtgatgcctccagctttgttcttttggcttaggattgacttggcaatgcgggctcttttttggttccatatgaactttaaagtagttttttccaattctgtgaagaaagtcattggtagcttgatggggatggcattgaatctgtaaattaccttgggcagtatggccattttcacgatattgattcttcctacccatgagcatggaatgttcttccatttgtttgtgtcctcttttatttccttgagcagtggtttgtagttctccttgaagaggtccttcacatcccttgtaagttggattcctaggtattttattctctttgaagcaattgtgaatgggagttcacccatgatttggctctctgtttgtctgttgttggtgtataagaatgcttgtgatttttgtacattgattttgtatcctgagactttgctgaagttgcttatcagcttaaggagattttgggctgagacgatggggttttctagataaacaatcatgtcgtctgcaaacagggacaatttgacttcctcttttcctaattgaataccctttatttccttctcctgcctgattgccctggccagaacttccaacactatgttgaataggagcggtgagagagggcatccctgtcttgtgccagttttcaaagggaatgcttccagtttttgcccattcagtatgatattggctgtgggtttgtcatagatagctcttattattttgaaatacgtcccatcaatacctaatttattgagagtttttagcatgaagggttgttgaattttgtcaaaggnnnnnnnnnnnnnnnnnnnntttttgcatcaatgttcatcaagggatattggtctagaattctcttttttggttgtgtctctgcccagctttggtatcagaatgatgctggcctcataaaatgagttagggaggattccctctttttctattgattggaatagtttcagaaggaatggtaccagttcctccttgtacctctggtagaattcggctgtgaatccatctggtcctggactctttttggttggtaaactattgattattgccacaatttcagagcctgttattggtctattcagagattcaacttcttcctggtttagtcttgggagagtgtatgtgtcgaggaatgtatccatttcttctagattttctagtttatttgcgtagaggtgtttgtagtattctctgatggtagtttgtatttctgtgggatcggtggtgatatcccctttatcattttttattgtgtctatttgattcttctctctttttttctttattagtcttgctagcggtctatcaattttgttgatcctttcaaaaaaccagctcctggattcattgattttttgaagggttttttgtgtctctatttccttcagttctgctctgattttacttatttcttgccttctgctagcttttgaatgtgtttgctcttgcttttctagttcttttaattgtgatgttagggtgtcaattttggatctttcctgctttctcttgtaggcatttagtgctataaatttccctctacacactgctttgaatgcgtcccagagattctggtatgtggagtctttgttctcattggtttcaaagaacatctttatttctgccttcatttcgttatgtacccagtagtcattcaggagcaggttgttcagtttccatgtagttgagnnnnnnnnnnnnnnnnnnnnnnnnnnnnnnnnnnnnnnnnnnnnnnnnnnnnnnnnnnnnnnnnnnnnnnnnnnnnnnnnnnnnnnnnnnnnnnnnnnnnnnnnnnnnnnnnnnnnnnnnnnnnnnnnnnnnnnnnnnnnnnnnnnnnnnnnnnnnnnnnnnnnnnnnnnnnnnnnnnnnnnnnnnnnnnnnnnnnnnnnnnnnnnnnnnnnnnnnnnnnnnnnnnnnnnnnnnnnnnnnnnnnnnnnnnnnnnnnnnnnnnnnnnnnnnnnnnnnnnnnnnnnnnnnnnnnnnnnnnnnnnnnnnnnnnnnnnnnnnnnnnnnnnnnnnnnnnnnnnnnnnnnnnnnnnnnnnnnnnnnnnnnnnnnnnnnnnnnnnnnnnnnnnnnnnnnnnnnnnnnnnnnnnnnnnnnnnnnnnnnnnnnnnnnnnnnnnnnnnnnnnnnnnnnnnnnnnnnnnnnnnnnnnnnnnnnnnnnnnnnnnnnnnnnnnnnnnnnnnnnnnnnnnnnnnnnnnnnnnnnnnnnnnnnnnnnnnnnnnnnnnnnnnnnnnnnnnnnnnnnnnnnnnnnnnnnnnnnnnnnnnnnnnnnnnnnnnnnnnnnnnnnnnnnnnnnnnnnnnnnnnnnnnnnnnnnnnnnnnnnnnnnnnnnnnnnnnnnnnnnnnnnnnnnnnnnnnnnnnnnnnnnnnnnnnnnnnnnnnnnnnnnnnnnnnnnnnnnnnnnnnnnnnnnnnnnnnnnnnnnnnnnnnnnnnnnnnnnnnnnnnnnnnnnnnnnnnnnnnnnnnnnnnnnnnnnnnnnnnnnnnnnnnnnnnnnnnnnnnnnnnnnnnnnnnnnnnnnnnnnnnnnnnnnnnnnnnnnnnnnnnnnnnnnnnnnnnnnnnnnnnnnnnnnnnnnnnnnnnnnnnnnnnnnnnnnnnnnnnnnnnnnnnnnnnnnnnnnnnnnnnnnnnnnnnnnnnnnnnnnnnnnnnnnnnnnnnnnnnnnnnnnnnnnnnnnnnnnnnnnnnnnnnnnnnnnnnnnnnnnnnnnnnnnnnnnnnnnnnnnnnnnnnnnnnnnnnnnnnnnnnnnnnnnnnnnnnnnnnnnnnnnnnnnnnnnnnnnnnnnnnnnnnnnnnnnnnnnnnnnnnnnnnnnnnnnnnnnnnnnnnnnnnnnnnnnnnnnnnnnnnnnnnnnnnnnnnnnnnnnnnnnnnnnnnnnnnnnnnnnnnnnnnnnnnnnnnnnnnnnnnnnnnnnnnnnnnnnnnnnnnnnnnnnnnnnnnnnnnnnnnnnnnnnnnnnnnnnnnnnnnnnnnnnnnnnnnnnnnnnnnnnnnnnnnnnnnnnnnnnnnnnnnnnnnnnnnnnnnnnnnnnnnnnnnnnnnnnnnnnnnnnnnnnnnnnnnnnnnnnnnnnnnnnnnnnnnnnnnnnnnnnnnnnnnnnnnnnnnnnnnnnnnnnnnnnnnnnnnnnnnnnnnnnnnnnnnnnnnnnnnnnnnnnnnnnnnnnnnnnnnnnnnnnnnnnnnnnnnnnnnttcatacgtaccaggtgttctcacagttggaatcactcttgatagcaaggtggtttctagtatttgcaaaagcctgacaaactataaataaaaaccaaaccaacccaaccaccttgattaccatattcttcctcctaccgccttctccctggccctttgtaatgagactgtcgtctctcagacccattttacaaagacctgtatttcagagagaggacaaatctgagtgaggatacttttaaggaaagcaacaatccggttttttgaaagaaaactatgcttccaagtatgatataaattaattgaaagtatcatatttaatgagtgttagtactgaaatcctcttgaaactacagtatttaaagttacctttctaaagatgagtagtcttttattaaaattcgtagaaattttaaccttccttcacataaggttctcaatttctctgagcaacaaatacttctaccaaagacttagcatgctaaatatttgctgctaacatactacatatacatttatatgtaattcttgttgttttttttttttttttttttttttttttgagaacaggtcggactgcagtggcgctatctcagctcactgcaagctccgcctcccgggttcacgccattctcctgcctcagcctcccgagtagctggaactacaggcgcctgccaccacgcccagctaattttttttgtatttttagtagagacggggtttcaccgtgtcagccgagatgatctctatctcctgacctcgtaatccgcctgcctcggcctcccgaagtgctgggattacaggcgtgagccaccacgcctggcctacatgtaattcttgacccttaagttataacttacacatgtatatcatttggagacaaattttcagcacttcttagcataattgttctcttcatatggttttctactaatccttttgctaagcttcagttaagggtttataaagccaatgggatcggtagaactgaaattagatcttttatcgtctctgtaaacttactatgagtagggacagatggtggccatagaattataataatgaactgatctagtaaggcttatgttacactgtcaactgtgtagactacagtagatcccatacattgtggatgtaaggaagttctactccattagccttcacctttcacagtctttatagcagtcacggaggataaggaaaagaaaaattaatttataaagtattttaccttttgatcctcattcttctcatgggatagcgttaagatgtgttctactgcattagtcttcaccttgcacagtctttatagctgtcacagaggataaaggaaagttaatttataaactaagtattttaccttttgatccccatcagttaagatgttacttactctacgtgtgtgtcactcgatgaccactgtgaagacagtaaaatgtacagtggttctcttgtggctcaagcgtaatgtagagtactggtcgaccttgtctaacttcacgttcccttgaggctgacttgctgtcacctgaagagaggtgtaatgcaatcggtctcctgaccggaagtccactctttcattttcataaactttattcaccatcacccataactccccttctccttttctaactccaagtaagaaaaaataatgaacactttttttcactatctctttttatggtatcctctttttatgtttgttaaatccctactgcttagctctttgtaaatgaaggtaacttactgaggtgagaatgatcaaaaaattctccaggccttgtaaagggcatttgatagaggttttgatcaacctggttcatctcatccttgtatggaagaatgcaaatgggctacataatgtgtttatagcaggtatttttacctcattgtgagggtggattgagtcactcaaaaatttttttcatgtattaaacttgtaaatttaaaaatcaggcatccgtgagttgatgactgttacttttttttggcaaactttgactctggtgatttctagacctttttttaattacctttttttttttttggtcagatacatgagtgtgataataccttttttttgttttttaacatgggcaacccacttccctcagcaatctcgcatgacatacagtgactctcagttggtattttccctgttcacgatctctgctccgcaaaataattttattttatgccacttgtaaaacctataatctattattagtaaccaatcagtaaccatattaagtagtatttctcttaatctcaattaatagacttaaagtaaggctaggcatggtggctcacttctgcaatctcagcacgttgggaggctgagacagcaacatggtttaaggycaggagtttgagaccagcctgggcracatagtgagaccctatctctatataattatttataaataaatatttaataaatatttatttaaaatataatgaattaaattaagaagtatttattagtactccttaaatatatatacttatatatttaaggatatacatgtatatccttatatttaaggagtaataaatacatacatttatatatttaaggagtactaatattaacacaatataaaaagtttaaaaagctactttgtctccccttaagagtagatacaactgtgttctattatttgtagattgataaatctgtgtatctttcaaaagttcctttttattcattctatcctgccttggctggatattttaatgaaatcataggactccagtctacatttctattaggatagaaaaacactgattatgttktattcgtcccatgaatttgatgatgcttgaactagcctggccacatatcattttgtggagtagattttctgtggcatatcatctggaatacagcttctattctgaaaatcaagcaatttatagagcaactgtaggtatagtgttacccagtgatctctacttaaatcatttcttcttcctaatattatctctttcccattttcagcttggaaggaaaatggctcttgtgttttagtctagcaaactctgcaggcacctgtggtttaatggaaaaacctgaacttagggtctgaatatctgggatctagtctttcctcttctgtttyataacccagtagtcttcagcaagtgtctaactttttctcatctttggttttctcagtagtaaaagttggattccaagacctcctttccagcttgttgtaatgattaaatgagaccatgcatgtggaaattgcattaactaatgtaaggcattataaaaatgcaaggtaatactgttattataaaataacttgcttcatggccgggtgcaatggctcatgcctataatcccagcactttgggaggctgaggcgggaggatctttcaagcccaagagttcaagaccggcctaggcaacatagcgagaccccatttctaccaaaaaatacatatccatatctatagatgtatagatattaaaaattagtaaattccttgcttcccacagttcctgtactaagccagtcagaataagggctgcatgtcactcctacatttcacagccttaggartaatctatatatttgactggctcagtgctgtgttaaataaacacagattaattgactaggctgaggatgaaataataatctgaggtagctgtgaaattacatagttatttacttatgtagttatttattgatcattattccttcatacttatttacttttttcccctagagagctcaatctgctctgtgtgtgtctttgagccttttttgtataaaaagaacctcagtttttccaaatggagaaaaaaatacatatttatttaagaagcatcaataaaaattacaagttgcatgagagttgatattagtggtagtgtgccttactgtgtcgktgttctttatataataatgccttgtgttatatttgaatacatgtttatacaagacagttaacttttctgctaagtcagtaaatggcattgatacttattaccacaaagcatgtaaatttatatcttataagagtaaatcaattgactgattcattttctctcaactgtttttattttccagtgctttctctaaaatggataacatttggggaatttcatgacataattgtaataaagcctctgtacaattaaatggctttaactgaagccaagcatgtttctctttcccctacttcccacctttttaaaattaaaagcttcccagtctttttaggttgtatttgtcatttaaagcattttgtattgcagctggattctgaaactaggttaaattgtctgtttctcctggaaacattccaacagagatcagtttcttttctggaccttctagttcaatactttgctcttatatactgtgttgaatagaactgaactgctatttattggatttgtcagccttaaattccagttactatttttgcctcaatggtgtagctatttaaaagaattaaacagcttaagaactgtatttttagtctatttgggtagtaatatactccttcctgttcattgttctttcagacatttgtcagaaaatttcacaagcatgtagttggtttgtccaagcataaactataacttcaatataaagaaagcttaataatacataccagatatacaattcattttatacacacatacagaaacaggtaattttccttggactttttgtaattttggaagcctgtgtaaattagtctaccagattatattattcagcctgtaaacatgggagttcaataaaattaatcatcagaaacacagtttaagtagcttgtaacctcactggggagaagcttgaaattattccgtgcttttgggttaacttaacaaaaattgctgccttttttcaacatatagcctttgaataagggagataaattactaggtttggttttgttttaggtgattttgataataccaygagtggtacctctgttttcatcttttgtgttagaaaatttaaaaataattaagctatagaattaattttatagtgatattataatcccagaagaatcacaaaacatcctgttctgagaagacttagtctgattatgctgcttatttattttattttttgtttatggggttttttgttttgttttgttttgagatggaatctcactcttcacccaggctggaaagcagtggtgcaatcttgactcactgcaatctccgtctcccagattcaagcgattctcctgcctcagcctcccaagtagctgggattacaggtgtgtggcgccacacccagctratttttgtgtatttagcagagatggggtttcgccatgttggccaggatggtctcaaactcctgacctcaaatgatctgctggcctcggcctcccaaagtggtgggattacaggcctgaaccaccacacctggcctattttttgtttttgggggcgttttttgctttgtattattagagcaaatgtggaagctttccttagtagttggctgatctgtacttttgtttttagataaatgttcttcactttgttttcagaaactactatttctaaaattaggaaatacagatatttatattacataaagttaaatactacctcagaaaaagtgcctgttctttttgaagtgagtgtcttcaagagtgcagggaagacgatatcttaaggaagatagaaagtgacatgcattaagttgcatcttgggatctttcttggccttccctgtcttttcccattctcataaatgtcttccttaaaagcctcaatgtgtggtagtcgagcagcagcatgagttagaaatttattttcaatagatgatgtgcttttgagttaattatccaaactgaccaagttatgcccagaaatgtgtctgtaagggacacaaatgtgccagttgcaccaaattatagcatactggagttgaaatggatctcagaaatacttaagtgctaaccagcctaacatcctaaatgtatttataaaaatatacaagttatttttaatattcttaaaaagcctatttgttgaatcagtagtgcctrttgtgtgatcgattgtcttagcttattttataaggatttttgggaagaagctgaagccttttgctatgtggagctcttgcttgagtgaacctggtctccatggaacttgcttctgtattggcttttatagtcctgctcctttatagttcttctccagcttccatttttccttttgtctcctctgaggatttttcttccactctccttttccaaaatattgttgttktcaaggttttatccaccttgtaattatctttctgtattcctttccttaatgagctcatttatcaagtagctacaactattaatcccctattccatttcgtaatctccctggagcccccagccccagtcctcagccctccataggtattgagcaaatgctggttggtaggtgagtggtgggagagtgagtaagtgaatgatgccccctcgactgtgctccaaccttttctgacaaacgatctgcacaatgtctttactttgatgttttacctcagaaggtgcctacctcagtgagccttatctgagagtttcatacctacttaaacttttttttttttttttttttttgagacggagccttgctctggtaaccaggctgcggtgcggtggtgcaatctcagctgactgcaacctccgccttttgggttcaagtgattctcttgcctcagcctcccgagtagcttggattacaggcatgcaccaccatgcccagctaatttttgtatttttggtagggacggggtttcactatgttggccaggctggtctcgaactcctgacctcaggtgatccgcccacctcagcctcccaaagtgctgggattacaggcgtgagccaccgcacccagcccctacttaaacttttacaactcaatttcttttaatagttctaccttattttctaatcttccagattcccccctccttccccccctcaaaaaaatgtagtcatctttgacttttctctctctctcttctgttgtgaatttggcttttaaacacaattttttttctttcaaaatttctcagatttagcccttcttttccatttttctgtaactgtcaatggttcagggtctcatcacctcatgcccaggttattagcatgtctgctgctaacatttcctccacccggcaatcatttagacataacagaccaattttcataaaatgttatgttgctttttcaaaggctaaagagaaaacattgagaatctttgagatgagtatttcagtaaatctgattgcagtaggtagaaaagaaatgggaagataagagaatcaatgtgaatagaatgcatatttgaaaagtttggcagatagattagaccattaacagaagatttgaattaggtactagtttcactttacagaatgaaacaccttacaaagtatttgtttttaaaataaagttgaatatattagagggatgcattttttgaaaaaaagcccatgaacagttacagggtaatagtataattgtgtaattgagattttgaaggaggcaagaaaagatggagtccaaagtgtaagtagaagactgaaatactcttttttttagaagaaacttctgttaaggatgaaaatggagatacagaggagtgaattgttaaataaaaacaggtatacacaatggtgctttaccagatgatctmattcttaactctttgtatccttttcttttttttcagcatgttgacatagcggctttattgataaaatacaacacgtgtgtaaatgcaacagataagtgggcgtttactcccctccatgaagcagcccagaaaggaaggacgcagctgtgcgccctcctcctagcgcatggtgcagaccccaccatgaagaaccaggaaggccagacgcctctggatctggcaacagtaagtcctcatttcagatactgattattgttccttctactttcacagatgacatcagattctcgggttcaccagcttacttttagtcgtgtttatttcacttagaacagagatcttctgaaaatttttgaagttcacactttttctatgaaaatataatttaaaactcttaagacaaactaaacagtaagttaatttaattttttkscattcttagcctgctgggaaaacatggatcttaagaaaacatgtttttagagtgtaccctcaaagaattatatttagtaaaatatcttgtaccttctatatttggcatgttattgtagagcaactaatgttcatgataatttacctaagtctgtgagatagtcaaagaaaaattaactctgggcagtattatttaactgcaaagttaagcactgcatcatcttccgtgaactttctgaaaaccagggagttactgtatagtcacagtaatttctaatttttaagccagaaatgttttttcaagttatgttctgtttcatttattgattgctgcrtaacaaactgtttcaaaacacccagtggcttaaaataataatgacttattatttcttatgattctgtrtgttggctaggagattcttctggtcttacctggggtcacttgtgcaactgcatatagctggtggctggggcagaaacataaagacggcttcattcatatgcctggggccttgacagatacaactagaagscasgggcctctctagtcccatgtggcatctcatcattaagtggtcttgttagaatttcttcacagaataattgtatctcaagagggagaaagcagaggctgtcattgttctttaaggctaagcctggaactgacatgctgtcacttctgccacattctgttgtgcaaagcaagtcatgaagtcagctcaggttcaagggataggaaaacagattccaccttctttgaaaggagaagcaaaaatttcgtggccatctttaatcagccacagtcttccctgtgaatacaaattaaatctatttttcccacattcaaattacactcacctgccacgtgctccccccaccaacagggggcagatagtcatcactgggtccttagcaattctaaaattcagccagacacatgttatcagggccatctactctggagttagggaatgatccctgattagggcccagttctgctcccagggagtggttcactgtggctgtctttttttttccttttttttcttttcttttttttttttttcccccttaagacacagtctggctatgtcacccaagccagagtgcagtggcgtgatcatggctcaccacaacccccaacctcttagattcaagccatcctcgtatctcaatctcctgagtagctgggactacaggcacatgccactatgcctggctattttttttgtttttactttttgtagagacagggtcttgctatgttgcccaggttagtcttgaacttctgggctcctccctcagcctccttcctcagcctcccaaagtgctgggattacaggtgtgaaccactgtacatagcctctgtagctcttggccatgccctctgaattatccttctcttttcataagaaatggatcatatttacagccaagtggctttctcaacctgttccctgctcctagaaattttcgggaccctgagccttttatcattttgatctacctgtcccttttagtccaaactagtacaactcttcctttgtaaacttttggatttcccatcaaattacacaccactccatcagccaaaagctccacccacaaatcttttcaagacaggtccctctctaacatggaatccaagtaaaggtgcagtgggacaatgcccataagatcctttgaagctctttcatctagccaagggaattcacaaggtaccaccttagaggttttttaaagattttgaggtaatatatctgtacctctagttgatttttattctgaggccatgttttcctgtcagcacgctggatttgacctttggcctgaggctgtgccttacttgaagaaacttttgctgatggagaggctgggaatggtgaataattttgttttctaagctagcaaatgttaggtgaatacatttccttaaagagaactggacagttcctttctctcttcctgtaccttatcatgggcagataaacacaccagtccagttgacaaggcagaatttgttctggaaatttccttagccaaatttacaaatttatttaggtttacgttctaccttccgtaagacctcctgtggcagcgttgccaaactttctgctacacagcattagtcccctttctctcgccttcagtagcacttgcctatctaycttccattcacagcctccctcagcaataaccaggccacccttcacgcctccaaccaaagccacatgtccaccagcaccccacttccaggtactggtgtgcatttcatttctctattgctgcccactaagccacccccaaacccactgagggtttaacgtgacaatttattatttctcacacgtctgggagttgactgggctcagctgggtggttctggttttgcagttacctgcacctgggaactcagcagaggctggagcttccaagatggcctttcatcccgcagggctctccctgcataggatctcaccactcagtagtctagcccaaacttctgtacaacatggcagatggcttctaagagagtaaaagtagacactgccaatccacttaaagcctggctcaaaagcctcagaatgtcacttcttctccattctattggtcaagacaactcacagggcaaaccacattcggcgggtagggggcagaaattsaaggggaggcatacatgacgggaggaaggaattgatgggtggctgtctttggagactatctcccgcatactcgaaaagcagttgcatctaatacttaaaaactgaaaagtttatgaataaatgagctaaattaaagtgtcatccctttgaaatttcaccagatgttaattgtacatgaaattattaagtgtgaagtaaataaccagattatagctgtttaaacgtaaacaaaatatagtaaacacagaaattttttctaaagaagggtgacagttaacactgaaagtgcttttttttaaatgaaagaagaaatatctttaaaaattacatagtttctccaattctgtctactgaaactattgaaactctttggagctgtggataggagaaggaatgatcaaaaaccagtaggtgataatgaggcattcattaaggaaaaaatccacaaagtatttggttatcagtgaaaaacttaccattttaatatatagtattttcatggtttttgtttttaatcatttttttaggctgacgatatcagagctttgctgatagatgccatgcccccagaggccttacctacctgttttaaacctcaggctactgtagtgagtgcctctctgatctcaccagcatccaccccctcctgcctctcggctgccagcagcatagacaacctcactggccctttagcagagttggccgtaggaggagcctccaatgcaggggatggcgccgcrggaacagaaaggaaggaaggagaaggtgagtagaccccatgaatgcttatttatttataccttttgttagtggagcagaatgacttttttctattgataactattgaatgcctcaattagagacgtcctgtctgtaaattttcatacacacaacatcttacaagaaatatttcttcatagaaggctgccacgtttcttggcattgtcgttgttcttatttctgtatattctagagcatctgtttacaaccatagcatcttattgaaccacttatactgaaattgtgtcagaacacaactgagaggtcatttcaggaatgaaaactaaaatgatagctgatacatttagattttttaattcattaaaagctttagatgtttctatataagtagcattctgtagtataagaattatactataatgttaaaattagtataatattctctatatttttataaattacaataagttataattctatattctaaccataatattagaatacaaatactaatttgataaagataaaacactctgtttttacttcccaatcaacttcagaaataaagtgtctaaattaaatctgtgtattctgtattattttatgccatggaaaatcatctgacagccaaggttgtcagagtcatgtctaaatggatactgaaattttctttatatttagagaattctttctgagaatctttaatatgtttctgttttagttgctggtcttgacatgaatatcagccaatttctaaaaagccttggccttgaacaccttcgggatatctttgaaacagaacaggtaaatactcttgtatatatttgagtcatttaaattaaatactaagattaggctggatgcagtggttcacaccttactcccaacactttggaatgcttcggcaggattgcttgagcccaggagtttgagaccagcctgggcaacaaagcgagacccccatctctacaaaaaaaaaagtttttaagttagctgagcatggtgacttactgggcccctgtagtgctagctgctgggaagctgaagcaggaagatcatgtgagcccaggagtttgaaactgcagtgagctgtgattgtgccactgcattctagctttggcgacaaaacaaaaccctatctcgaaaaaaaaaaaaaaaagaaagacttattaattgccacccacctcttcctcttttgcttcttaygagctattcttaaacccacaacacatttctataagaagccagaggagcccagtattttatacttctccccaaaattgtctaacaaatgagtctttattttatctttataagcagtctagcactatgcattttrttacatgtcaaaacttagaccatgcaactacctcaaaagaatgttttcatgattgtccttggttgtttgtttccgaaaaatgtcagtctttattcatctcatttcattattcatgtgactaggctcctgaagcagttgcccattaatttggaaagcacagtagtacttagacaactgcacttttaaaaaattgcccctttatgaagtttctgttgtccacttggagtcttaaataatattaaaccaaaagttggccatacattccaatagacccaccctattttgggatccatcttaaatgtctgtgaaggtctaaggatggagtcatcrttagggcatttatgaattaggattcttctgtttgttttactgttttcatacaggataaggagttgtaatattgtatgctttcattattatgatcagctttaaatattgaatgatggtaactcctgaatttaaatggactattgatatacatgaaatttaagaatgggaaaggtgtttagagaaaaattattctcccaggtgtagggatcacccttgtataataacacccatgttagtcctccagccaaggaagatatcttgttacaatttgggacaggtgtaatagaatgcttgtaacttaaagtgtgccaaaatctgcccgtaggtataattcctttgttttcagcttacgcttacgcttaccctgttttgcacagagatctaatctccagtctacatatgtattcagtttcagaggactatactccctacagaggctgtaggggagaatctattccannnnnnnnnnnnnnnnnnnnnnnnnnnnnnnnnnnnnnnnnnnnnnnnnnnnnnnnnnnnnnnnnnnnnnnnnnnnnnnnnnnnnnnnnnnnnnnnnnnnnnnnnnnnnnnnnnnnnaggctgtaggggagaatctattccatgcctcttcctgcttctgatggttggcagcttccttggcttgtggccatgctactccagtctctgcatccatcttcacattgccttcctgtcctctctatctcttctaaggacatttgcattgaatttgaggccaccagtataatcctgggtgatctcctcatctctagacccttaacataatttcgtctgcagacacttttcttccaaggaaggtgacattcacaggttctggggattagaacatagacgtatcattttgagggccaccattcagcccactacaacataatatggccctagatatctttttaagacctagtcaacttatcagaggtgtcaccctttcaatcacccacctctacacatcttcccctattttagaataaatctgttttttcaattattctttatatgacataattttccagtatttcactggcacctttggcccattatggttcccttctaggcttatagtcagtttggagttaacttaaaaaccaggtcttttttcttatttatatcaattatactgttaagattttttttctgctttctctcttttttttagctacattttttcattatagttcatctttaatgctcttaatgataagaacagccgagtagggatagcactggactaaaagaagaccttaattctaattatttttaccctcttactagctgtgtaaaattgggctgaatgacatttatcctatcacttcctttacctgtaaaacctaatgcttataaatgttcagagagttaaaatcctcagtaatattgtgctgctgtgtcagcttttaatacagtgatgcatcacaggtgcctttgcgtctaatggttaggactttatagactgctgtctataaaatcattttcttttccaaccatttattcatcctctggtttggagctttcttaggacaatatcctaaatagtaagastgcttcatccttattccctaactgaaggtgtgaaagctgatttaaaaccattatactctgctgttcccatattacagctatagctgttcttcccaaatcatttccacaataattgtaaaatttcaaacacatctttgctaaataaaccaaagaccttaactcaaacaaataattccaatttactgatgaaagttttctaaagaatgttcatttttcttcttttagtcagtttgcattataattttatgtgttctttttaaatttatatcgtatattcgcattgtcagtaactgacttcctgtggcgtatttatcacattttattgatttgaatagtttaatagtttagtctcctagtcactccttctgacagcttgtcctggtttcatcagtttcattgttctttttttactgcagtttcattctgagtaaatggttccattggttttcttttagccagaataatttcyatagccttttattgatcaatacatagacgattgcatttaatgtatattaccaagcacagttctttccctccagacaggtgatactacctttctttgtattgaactgtgtctggcccaatcatcaagcaatcaaatttatttttattttaattgcaaatgttatttatctagccttccattataaataaatttgataaccttttccataactttaacccttagcattttctcccattaacattctatatcagtaatatgtgatgatggtcaatgtatttgtatagtcggggaggagtgagggtgcatgcattgaacgcatttaattcatatctgtttggcttaagccaggggagccgttgttttctgatgctctttgacatgcttctatgtctcattgcctgtgttcctactcatggatgccagtggggtgtggaatgtagttattttatttctggtcccagaagaaaaccttcggcacatcatagcctcacctcctatcttcacagttactctcttggaagtctctaaactaaattgtcctgtttcccatagatactttgccaagttctatgttgaataatatagtatcctttctagttaatgaaatatagtacccatgtgactttggcscttcctttataacatagctttgtacctatgaacataggtagraacactttttatatgggaaagacagattttatttacactgcaattcctagaacataaatgctatcacttggaagactgcttgtggacatttttatggttaacctatgtattttcatggaaagtgaccagataaattttgatttcaaattcttgaagacaaaagcatggcctcccataattcattgtgaacttgattataaagttagttcttattactcctgctgtaccatacaaccttttaagcccaagcaagaggacgtctttttcattaaaactagttttctctccccacccaaagtaaaatgactctcagaagctagaggtagctctttttgcagtgacctttgctttatgtgcaagatgactttaactgacacgtggataatctttattcttagtaattttattttaatgtatactagatagaaataactagcccaacaagcttgtgatttcctcagtataataactaagtcaaggttttaaaaaaggagcaagttaatttaaatatgattttcagaaaaaaaaatgtctaacagctgataggggtatatataaaattcctgagtcttgaagcaacatgtctaaaatccaactaacctgctttccatccagatatttctatttcttttgttgatgcaaaagtctcatagttacccagctacagaattttggaataatcttactttcattccttttattttaaccatttctatttaccaggccctgtaaatacagttctccagttgctttcagattcatcccttccatgccattttatcttcttcttattcccagttgccttcccttccaaatctgcccttcataatgccaacagtctcatcctcctaaaatacaactttgatcatattactctgctgaaaagacttcccagggcctttggtatactttttttgtttttgtttgttttkttttgtttgtttgtttttgagatggagtctagctctkttgcccaggctggagtgcagtggcgtgayctcagctcactgcaacctccgcctcccaggttcacacgattctcttgcctcagcctcctgagtagctgggattacaggcataggccaccatacccggctaatttttgtatttttagtagagatggggtttcaccatgttggtcaggctggtctcaaactcctgaccccgtgatctgcccgccttggcctcccaaagtgctgagattacaggcatgagccaccacacctggccagcctctggtatacttctaagcctcttagtttgatagataaggccctttaagatcctctctgtgcctgctgctctgctgtgctccttttaatccttgatacatactctcctgtaaccattttgaactacagtacttaaggtccctcaaatactctgtattcttttaactgattttccctttgcacatggtattccctctgtcttaagcmcacttccctccttcccctgactgatgagctcctgctgcttagctgaattatgaccttcttctgagaacctttcctcatctccttcctgctccttccttcccagccccccttgcaaccgtgaccaagcaggtcaccttcacgagagttctcttagggattgtccaagacattgacccactttttgtttcttggttacctcaagtaaatagcatgaactttggttagcactctgtttcatggccccactcttttactatcagttatttggaccaactatgtaactttccaactataaggggttgttttagaattaaatgaaatatttagttactttttaaagaaatacatagcataaagaaggtactcattaaacattttatatgtgaatgagctaacataaatctgaatttcttagcttttcattgaaggtttttcagtggccactgcctgatagatatgtggacaaattggacaccrtgtaactcactgcgactaaatttaacgcttaatcatgtccaccttctagtcatccttttaaagaatataaacagggaaaagacagatacagctatacatctcagctcttctgtgtactatttttatgacttctctaagtaccagtgacctcataaatacattaatagtacttcattatctgtcattgtaaggattaaatgaggaaatgtaaataaagtgctcggaactgtgcttgttatgtagcgagtacacaacaaatattgtgtggatggtggttggatgatgaatggttggatggaattgcaagaataatgtatatttatattcagttgcaagtatagaaagttgtcccattccctttttgttttttttagattccacaggttgatagcttttcatctcttctatccttcaggatagcctaataaacattttcttttgtttctttagttacttattttcatatgcattccttttgtgtgactgtaagtatctaattggataaatgccaagatagcgtaggtagatcacttatctactgctgtgtaacaaattacccaaaacttaatggcttaaaataacaaacatgtattattccacagtttctgtatgtcaacaatctaagcatggcttagttgggtgcctctggctcaaggtctgtcctgaagctgcagtaaactgtccaacaggtctgcagtctcacctggggactcacctggcaagggctgggacycgctttcaagctctctcacagtgttggttgactggccttgattcctcrcctgtgggcctctccacagtgaccttatggagtattacttacctgctgctgcttgataaattaccgcaaactcagcagctcaaaacrgcacacattttgtgagtcaggagtctatgcacagcttagttrtgtcctttgcttcacgatctctcacaaggctacagagcattagccagggtcagtatctcatctaaagactctactggagaaggatccccttccataccctcacgtgcttattggcaggattcagtcccttgcagtctgttggactgaagccctcagttccttgccatgtgagmctgtataacatggtttcttgctctatcaaagccagcaagagaaagatgatctgctagtcacttctcatcaccattgctgtatttgcttggttagaagcaagtcactaggcmagcctgcactccaggggaggggagcacacaggatgtgatgtaaggaggtgggaatcattgagtctgtctgccatagcgtggcagccagttcttctagggtgagcagtccaaagcgtgagcgcccaagatggaggccacagtctctttattacctaatgtaaaaagtaatttcccatcacttctgctgtattatatttgttagaagtgagttcataagtctgtctcacacggggaagggattacagtgaagacacaaatgccaggaggtaggagagcactttccacgttaggtgtgagagctcctctcagccttgccttctaaactaagtgacttgctatcagtcttttcaggttgttttgttgggtttggtttgggttttttgtattcattttatgattagagctataaaatgaataaatatattaaatattctccattactcctctagaacattgtagagaatattgtgttttgctggcctggtgtctgcttcctccagacgtgcactgtatgtatcaatccagaaaagtctgacgagggccaggagcggtggctcacgcctgtaatcccagcactttggaaggccaagacgggcagatcatgaggtcaggagatcgagaccatcctggctaacacggtgaaaccccatctctactaaaaatacaaaaaaattagccgggcgtggtggcgggcgcctgtagtcccagcgacttgagaggctgaggcaagagaatggcgtgaacccaggaggcggaggttgcagtgagccgctgagatcgcgccactgcactccagccggggcgacagagcgagactctgtctcaaaaaaaaacaaaacaaaaaaaaaaaaagtaaagtctgagaattctctaagttgaagttaccacatagatatgagacccttggttttaaactgaagttagtttagaatatttagaagaaaaaaatgggacatcaataacatagtttccaaattatattaaaatcatgtctagctaagaatgtaaaggctcctattaytttgtgaactattccatctcaaagatgtgtatttcagaactggggtttgttgttttgttttgttttgtttttaaagctctgctgaaacctttcttttgggtggttggatgtgaattgcccgctttgtgcaatgaagcaattattgcttaaatggccacttagaagcaatatagaaaattatttccaaagaacgagtgatatatgctcatttcactggaaagatcaaactcatattttattctgacaaaaaaatcagcagaggtccaggcctaatttktcagktttttaaatgttacttgcaagttaaaaagtggaaaaaagcgatcttgtttgagytggaaactgcatgtctataaaaggatttcttggttttccaaggcaggggaaaatcaaagactaatcttgtagactagtatatggattgtcacaaagctagcttcatcagggctggaaaattgcatgttcagccttcaagaaatgtggctacccgcgttcatcctgtgtgttcagaatgtagccactgggtggtagtagagtcccagctactttagtccataaaggaattaggttattttgagccaactaatcatctccattttacaaggatgaataaccaaaagttaaaaactaaccaaaaattaaaaagcactatgttgtataaaaacagaatgtattttaaggagaagggattaagtctgagaatttatgagagagtttaaaaagaatctaattttcttatccaaattggaattttaaaatgtagcctctttaaaacagtttgtaatctaaccaaatacttgagatgtcaatctcactgctttttaaggaagcctgtcccgggcttgagtatttcttagcactgagaagttcttccttatcttcatctaaaaattgctttctccttttcctgcgttgtttacttgtgctgaacgcctctccctttcccccaccgttcatttctactccctgctggatactaggatctggtgttttcccattttcaagctactgattcctcctctatcttgaggcaagcagtagatgatagaacaaaataatctaaaggaaatatagtgatgatcattttgtatttctatagtattgtttctccctttttaattctcatggacaaaaagcaaatcaaagagtacttcaagtaagcagaaaagctgatgagactatcaagacaactttaaaaaaattgtaagctcatgtttataaagggaacaaaagaattttcttaatttgaatggtactcgtagcattgaaggcaattggaaaagcttttgtcctcttaagaactgttaaagatatcctagctaattttgtttcatttttcagattacactagatgtgttggctgatatgggtcatgaagagttgaaagaaataggcatcaatgcatatgggcaccgccacaaattaatcaaaggagtagaaagactcttaggtggacaacaaggtaagctattcagaaaaaaaaaaaaatttcagaaatcagtggtacaaggtaagtattggggctgataattgaactcaggcagtccagtcccagaaccatacactgaactattgtacctcctgtcccttccccatctcagttattggcctcatgctccctctagctggaaaaatctgagtcagtcttccctgtctcccaacastttgtatcctcaatttttctggaatctctgtacttctgtcctttcccatgactgtcacttgatccaagccaccattctctctcgtggactgtcccagccacctggtttatctccagcctttacatttgcttcctgcttccttccagtaccttctctacaatgtgaacacaatcttttcaaaatgattatatgatcatatcactccattgcttaaacccctgtaatagaatcctgtttcttttaggatagaatcaaacattgctaacatggttttttacaatctaacctttcttaacttgaactttcctccctcccacatgactgtcagctttgtctttttccattgtactttgccgttacaagcctctttcccctctgtttttacccatttctctatttgttagaagcaccttcactataggaaagcaaggaaggagaatctacagagctaatcaaattataaaagagtgatgtgaaattcaaactggaagattttgtgcttgagtcttgcttatttatctgtattttagttcatccatgaaactaacaaagataatgtgwtttaaagcaattgtaagtggctatttcaagccatcttacaagagtttttagaggataatttttatattttagatctgactatattgtgatgtcagtgcctgtttttcttttttttgtgtcagacatagcttcatgtatgttcatgatagagtttaattcaacaaatatttgttgaactctgcagtctgtacaagaagctctgtaacaacagataaaattgggctgggcgcagtggctcacgcctgtaatcccagcactttgggaggccgaggcaggcagatcatgaggtcaggagattgagactatcctggctaacatgatgaaaccctgtctctactaaacaaaatacagaaaattagctgggtgtggtggtgggcgcctgtaatcccagctactagggaggctgaggcaggagaatggtgtgaacccgggaggcggagcttgcagtragccgagatcacgtcactgcactccagcctgggcgacagagcgaggctccgtctcaaaaaaaaaaaaaaaagaacagataaaatcagtccccaaacatcttcatttttttctcctgtctgtctttgagtatatttgtttaaagtaaccgaatttatcaggttcaaattgcagatagtttaggtttgttccaaaacctcaattacttattatgaatttttttttttttttttttttwataaaatagagcctgagtagtgtagacttttgttttatatgttaatttttctctccgacaggcaccaatccttatttgacttttcactgtgttaatcagggaacgattttgctggatcttgctccagaagataaagaatatcagtcagtggaagaagaggtaatatacatcagaaatctttcatttgcttttcttgaaatctgtggataaacctctttttctggaattaacctcgtcttacattgccttgcggtcacatgcctattaatcagtctgtcttagccactgtggtagaatattgccaaaattaaaatatgacggcgccccatggttttcacatcataagcctaggttttctaatgcatggggcccatctgtctttttattctggagattttcttgaatctcatgcaaaataaataaggagcctattacaactattttcttatattgttacagtgccacctaagaatgacatagaatgaaaaactcttgcctcatagagagcaaatatgttctcatccttgtttttatgcagttataaatgtgactataaaataatatgcctaatcgtcacgtatgcttctgggtctgcctcattattctgcataacatttttccagtcacagttcttctgagcccctatgaaggctgtttgtgtaaccctcctggtggtcagatgccagtgagactcctgctccactgacggcttatgcataaacaaacagcctaatgccattgttataagtaagctacccaattgtgttatgcacatacctaggcagaaaaaggtatgcctaattcttgtttgtttgtttaattagtgctcattttattttcattcccaggctaggaacttgcatagggaactcaggaccatgaccccagggctgtatttcagctcatacgtagcgcatcaggaaggcatcatggggtccggtgtcttactmcctaattctcctagcagttagtacattttgataacaatgtcaaaaatgtagtgactcttcacaagtggagcagtaaggaagagaattcattttttttattgagttaattctctgagaaacttagatctttaaaacatttttcttttccataattatttttaatttagagagtagtcagaagacagttattccctttagtagtacattatagtcaatgtcccctggtctgtgtaaatatacttagagatcccaagctgaagactattgagataatatggaatatttcacctacagaacaaatattttttaaaaattgtttatttttagcatttgtccaacgggcatttaaggagtttttgtttgacttaatcagagtgttagttcttcttctcaataagataagatagtaattgtagatgacttaatgtgttttttaatatgtttccccattgtgtttacagaaaactctttcagaacttttatttaaaagtaaatagaaagtgcataaatktaatatttatgtttgaaattattttctcaccaaaaatacttatccactaaayttgttcatcartttatagtgaactcctatttatttattaatactgaattttagactcatcattgtctagaattacacactgggatgtttttataaaattagttattttgttctgtagatgcaaagtactattcgagaacacagagatggtggtaatgctggcggcatcttcaacagatacaatgtcattcgagtaagtttttaaagtttcatggtgaaaactggattgcaaggcttgcctaaaaaccaaatctagacaatgaaaaaagtttattaagtcatattttcaaactgtgaaagataattcgtcacctgtctgaagtcagatagcactcttctcactacaatatctctaactccccaagacaatacgtcactaaaaatagagacattctgaaagcgtcaaagctacaaacaggaggctaaatcagcttctactagtgatacttacgtggatattggtctccctgctcatgcacaaatacaggccatagctgacaataatgttttttatcatttgagagttgcatcaaagtcctggatcttcaatctaattgaaccagtaattacctcagaatacatatatttcttaatctcggtatctcaatttataatatggaacagatgactcaagctttttacaaaggggtatcataaagatgaataaaacctgtagagaactggtttaaccctttgagttaacagacctgtaaaagttatactggtacacatcagaataacccagggaacttttttaaaaaaaatacagatttacagatccccatctcctaaaatgtattaagtctggggagatgcctaaacataacctttttacctatttttttttttaatcctgaggtgatttagaggtaacagccaggtctggtatagaacaacaaaaactgtaacygaaaattatgtcactaacagcyagagtattttctsaattacactgacatggtagctttatcacttttaaattatgtcttaagcaaaataaaaattgaaccttcctaaaaggaaaacatacttttcattttaaatcataaatgcacgtttcacmgataatgtttctttcttcttcatccttaaagattcaaaaagttgtcaacaagaagttgagggagcggttctgccaccgacagaaggaagtgtctgaggagaatcacaaccatcacaatgagcgcatgttgtttcatggtaagcagcgtggcagggacggtggacgtctccctgggcctttgcaggagtcagtaaagggaaaaacctaygttaaattgactataatacggttgtgttaaaaacggcttgttttgattattttgttcaaataattacttcttggtaccagctttctaatgtatcacacatcagtacagactttccagtgcatatacagtgaaaatacttgatctaaaattattttagtacttaaattgcaaattgagccacctagtgaattacttttgttgtaattttgtactagtacattattatgtataatagaccttcttagaaaatacttttcatttatacaccattcatttcttaatattaacctgcccgatgcaaatagtgtgcaggtaattgagcttctagaaaagtgttcaaaaacgaatctttctgtcttcgtatttctaggttctcctttcattaatgccattattcataaagggtttgatgagcgacatgcatacataggaggaatgtttggggccgggatttattttgctgaaaactcctcaaaaagcaaccaatatgtttatggaattggaggaggaacaggctgccctacacacaaggacaggtcatgctatatatgtcacaggtaagcatcttgccattagtgtaacgtttcccacccctaggtcacgaaccaaattgtcttttttttttttttttttttgagatgaagtcttgctcttgtcacccaggctggagtgcggtggcacgatcctggctcacgcaacctccacctyctgggttcaagcaattctcctgcctcagcctcctcagtagctgggattacaggcacctgccaccacgcccagcaaatttttgtatttttagtagagatggggttttgccatgttggccaagctggtctcgaactcctgatctcatgatctgcccacctcggcctcccaaaatgctgggattacaggcatgagccaccgtgcccagccccaaattggtttatcaggctctgcagaagtcacagattatcctcagtcttgcatcccggtaaatcccgttggttctgggaatgggtgggaacagctgatcagcctcttctgacaggagcaataacaacagagcagataactaggggtaaaaaccaggtacatggcctccagtcacgggttatgataaaactccctgcatcttggctttctccctgggcttcacttttcttcctctgtaatcagaatatggcaaggctaaggatgatttctgtggaacaaagaactgctagctctagtcacatttgaatgaagacacacttctataaaaaacatagactctttaatttacttctgatgttgctggtgatgttgttgttttaaggcaggatatataattagccttggcaacttaaaatatcaactttggaattaatagcaaacaaatgaatattggccttgttaatagacttttaaaactcaaaaattggagagaataatggtataatctctgtgatgtcagtggcgaaaaaagtactttccctttccttggcaatgaaaaaatacaaaagaattatactgtacaaagattgggatttattacatttctgtgtaaacttacttaccaaatgcattctttttaacaagccaggttaataagatactttgtaatttggttaagaccttaaaaagacccaaataatttcagaacaaggatctctgagggagaaaagccccagtaaccttgaaattgtgattattgaccttaaaacttatctctcagttgtgttttgaacaaaattattgccatcagccatttggagtcggatgtcatatacccggaaggaaacttccttccattaagacctctgtggttaggaatacagagaaattttcggctgggcatggtggctcacacctgtaatcccagcactttgggaggccgaggcgggcagatcatgccgtcaggagattgagaccatcctggctaacacggtgcaaccccgtctctactaaaaatacaaaaaattagccgggcgtggtggcaggcgcttgtagtccaagctactcgggaggctgaggcaggagaatggtgagtacccaggaggcggaggttgcagtgagccgagatcgcgccactgcactccagcctgggcgacagagagagactccgtctcaaaaaaaaaaannnnnnnnnnnnnnnnnnnnaaaaaaaaaaaaaaaaaaagaatacagagaaattttcaagaatgtatagcatgtaaaagtatttttgggtttttttgtttgtttttttgcttcaaacctaattcctctggagacaaaaatgaacctaaataagcaataaaagtgaacctcaatgaaaattaacagtcgctcattaaaattagacacacaagtttaagtcttagccaggatttctggaaaacagagcctcaagcaaaagcatgtgactagtatttggccagtgcagccccagggaagcaggaatgagggcccaaaaggaactgaggtggagaagacagcagagcaaccgcagtgaggtgcattcatgagctggccacagtctcatagtgagtgcagtcgattgcccagtccatgaggcatctccggagaggctgtatcaactacggcatctcacaacagtagtatatcagtgagagaaagagacgaatttgtctgctggctcctgtcttgcatttgtcaaaatttgccaccagggctaattggtaaccctaccatttaggctgctgcgtctgcagaatgcaccacaatgcaccagacaagccagtgagcagacttgagccagctctctacttgcccatctgcagctgcagctcaccgctggctgagcaggtcccacgtcatctcctgcctcggcagcaacaggcgagccctggggcaggaagcagaagaccagggcctgtcaagttcacctttgtgtgacgtaagagactagcagaatctaacgacaacatagcactgccacaaatgtagagagagatggagctcaaaaagcctccttctgatggagagcaaagcccttttctctgggacctgcaggagaatatagtagaccaagccagcatcccagaggatcatcaatagcatccaactcaaaaagccagtccagataagacccagttgtcctggatccagcacaaattttagttgactcaagataaaatctctggttacttataacacaaagcttatactccattactaaaaacaatttgactgaattgtaactgtttacatttaacagtgtgatcatttgtactaatttgtaaaaatgtttattgcttatattagagattagcagacattttctttaagggatatataataattattttaggttttgcaggtcatacaatccctgtcacagtaactcaattctgcccttgtagcgcaaaagcaaccacagactatatgtaaatgaatgcatggctgtgtgccaataaaattgtatttacaaaaccagattgcaggctggattgagccatgggctatagcttgctaacccctggtgtatataatagactttcttcccagtcagtctttcttactctgtgatacttaacatctgctctaattcaggtttcacccagactattatgattttcagccatacatttaagctaagtactttcgttcatgatccacttttattattactgtttacctcatcccagtttctacttttttccctgtaatgaataaacccaatcttaatttcaggtgttgtttccatcagcttattttcttcactttccacctacccatccatgcaagggctcagttttttctctggttttttccctttttccaccaggcaaaacttactggcaggcattttctttttttttttttttttttttttcggagacggagtctcgctctgtcgcccagcctggagtgcagtggcgcgatctcggctcactgcaagctccacctcccgtgttcgtgccattctcctgcctcagcctcccaagtagctgagactacaggcgcccgccaccacacccggctaactttttgtatttttagtagagacgaggtttttaccgtgttagccaggatgggaattccaccaccagtggcgagatatcagatctccgnnnnnnnnnnnnnnnnnnnntccctagcaggcattttctatggccgattcctaagccataccaaaactactttaaactttaagtgtaactattgagtctggtaactgtttatagcaaatcattatatcaaattccatcccattcctactcataaatctgaaaatgacatttaaattagcttgccttatgttaaatttttaaaaaattaatagatctagcagttatattattgtaagatttaaagcttccttcaaagcattgtttttttctttttccttagacaaatgctcttctgtagagtgacccttgggaaatcctttctgcagtttagcaccatgaaaatggcccacgcgcctccagggcaccactcagtcattggtagaccgagcgtcaatgggctggcatatgctgaatatgtcatctacagaggagaacaggtatgttactcatcaaacaagcataaccaagttcacaaacatgtcaatagagcacagagaccgtgtaagacttgagacacttttcagtgaaatatccaccacacagtgtgctagtattaattacttcagatacaaaataaaggtatcaaaataattctttgacatcaactttttacctaaaacccattagtagctgtcagccacataacacagtgtgaacaagagggcagctgagaaacaaaggcttgggccctcatgccgttttgaggcctgcagctctgaactaatgccttgtgccacttcgtgggcagcatgccagggcagctgctgttagtgggtcttcatggatgtacatgccacaggatttgtccaaaaacaaaaacaatttgtctgaatgtaagtgaacttcaaatgaataccataactacaataaaagagaaaaataaagaaggaaataactaaatatatataacctatgaaaacagtattttatactgtgccttcagtcatgggcagggtagggaatgctgttgggggaagactgacaaaggaatcctgaactccttttagtaaatgtgttgatggagataccgtgggcaaaacagtgaaactcttaagcatattataggattgagcacatgagcggatgtgttgatgtattgatttgaggagccaaaattctcatggtagaagaagggacatacaaatatggaatggagaaggtaagaaagactctaagggtggactgaaattggaagtattactatgatctcatggtttctaacgtgtgtgtacacccatgtaaatttatgggtaagtagtaatataagcatgtgtgtgtatatgagagaaagagaaaccaaggaagggagggaaggagagagagagagacagacaggaaggaaaggagggagagaagagaggaaggaaggaagtgagggaggaagagagagaggaagggagggagagagcgaggaaagaagggagggaggaaggaagtgagggaggaagagagagcgaggaagggagggaggagagaggaaggaaggaagagagaagaaaggagggagagagaggaagggaagcagggagggagagagagaggaagggagggagagaagaaggaagggggaaagagataaagggaaggaaagaacgggagagagaggaagggagggagaaagactgagagaggaagcaagggagaaagcgagagaggaaggaagagagaaagggagaggaaagaaagaagggaggaagagaggaaggaaagagggagggaaagagagagagggcatgaatggaggggagaggcaggaagggagggagtagagagtagagagagaggaagggagaaagcgagagaggaaggtaacagggagtgagaaaggaaggtttggaggaaggagagagaaaaaaaggaaggcagnnnnnnnnnnnnnnnnnnnnnnnnnnnnnnnnnnnnnnnnnnnnnnnnnnnnnnnnnnnnnnnnnnnnnnnnnnnnnnnnnnnnnnnnnnnnnnnnnnnnnnnnnnnnnnnnnnnnnnnnnnnnnnnnnnnnnnnnnnnnnnnnnnnnnnnnnnnnnnnnnnnnnnnnnnnnnnnnnnnnnnnnnnnnnnnnnnnnnnnnnnnnnnnnnnnnnnnnnnnnnnnnnnnnnnnnnnnnnnnnnnnnnnnnnnnnnnnnnnnnnnnnnnnnnnnnnnnnnnnnnnnnnnnnnnnnnnnnnnnnnnnnnnnnnnnnnnnnnnnnnnnnnnnnnnnnnnnnnnnnnnnnnnnnnnnnnnnnnnnnnnnnnnnnnnnnnnnnnnnnnnnnnnnnnnnnnnnnnnnnnnnnnnnnnnnnnnnnnnnnnnnnnnnnnnnnnnnnnnnnnnnnnnnnnnnnnnnnnnnnnnnnnnnnnnnnnnnnnnnnnnnnnnnnnnnnnnnnnnnnnnnnnnnnnnnnnnnnnnnnnnnnnnnnnnnnnnnnnnnnnnnnnnnnnnnnnnnnnnnnnnnnnnnnnnnnnnnnnnnnnnnnnnnnnnnnnnnnnnnnnnnnnnnnnnnnnnnnnnnnnnnnnnnnnnnnnnnnnnnnnnnnnnnnnnnnnnnnnnnnnnnnnnnnnnnnnnnnnnnnnnnnnnnnnnnnnnnnnnnnnnnnnnnnnnnnnnnnnnnnnnnnnnnnnnnnnnnnnnnnnnnnnnnnnnnnnnnnnnnnnnnnnnnnnnnnnnnnnnnnnnnnnnnnnnnnnnnnnnnnnnnnnnnnnnnnnnnnnnnnnnnnnnnnnnnnnnnnnnnnnnnnnnnnnnnnnnnnnnnnnnnnnnnnnnnnnnnnnnnnnnnnnnnnnnnnnnnnnnnnnnnnnnnnnnnnnnnnnnnnnnnnnnnnnnnnnnnnnnnnnnnnnnnnnnnnnnnnnnnnnnnnnnnnnnnnnnnnnnnnnnnnnnnnnnnnnnnnnnnnnnnnnnnnnnnnnnnnnnnnnnnnnnnnnnnnnnnnnnnnnnnnnnnnnnnnnnnnnnnnnnnnnnnnnnnnnnnnnnnnnnnnnnnnnnnnnnnnnnnnnnnnnnnnnnnnnnnnnnnnnnnnnnnnnnnnnnnnnnnnnnnnnnnnnnnnnnnnnnnnnnnnnnnnnnnnnnnnnnnnnnnnnnnnnnnnnnnnnnnnnnnnnnnnnnnnnnnnnnnnnnnnnnnnnnnnnnnnnnnnnnnnnnnnnnnnnnnnnnnnnnnnnnnnnnnnnnnnnnnnnnnnnnnnnnnnnnnnnnnnnnnnnnnnnnnnnnnnnnnnnnnnnnnnnnnnnnnnnnnnnnnnnnnnnnnnnnnnnnnnnnnnnnnnnnnnnnnnnnnnnnnnnnnnnnnnnnnnnnnnnnnnnnnnnnnnnnnnnnnnnnnnnnnnnnnnnnnnnnnnnnnnnnnnnnnnnnnnnnnnnnnnnnnnnnnnnnnnnnnnnnnnnnnnnnnnnnnnnnnnnnnnnnnnnnnnnnnnnnnnnnnnnnnnnnnnnnnnnnnnnnnnnnnnnnnnnnnnnnnnnnnnnnnnnnnnnnnnnnnnnnnnnnnnnnnnnnnnnnnnnnnnnnnnnnnnnnnnnnnnnnnnnnnnnnnnnnnnnnnnnnnnnnnnnnnnnnnnnnnnnnnnnnnnnnnnnnnnnnnnnnnnnnnnnnnnnnnnnnnnnnnnnnnnnnnnnnnnnnggagggagtgggagggagtgagagggagaaagaggtgggagggaagaagggataggcagagggatgggggagggagaaagggagggagtgagaggagacagaggtagggagggatggagggggagagagggagagagaaggagggagggagaaacagggaaggacgggtggagggagggatgacatgggactcatcatgtacccattattagaccaggcaagaattattaatggatgctaaatatggggattgtttcactaaggagaagaatatttgcgtggttttcttattacagacttactttcaaagggggctggggggaggagtaattatatattggagaaaggggacaatgccttgaccagataatcaaaatcaacatcaccaatgagggacagataggcttatattatctctctaggtggatactctaaaggcacgacatctctgcagcattccagccaaaaatacatgatgtaagtctaatcaaaatgaggaatgttttactttttttaatgttgaaagattgtattcttcaaaaatgttaatattataaaagaaaggctgtgctaactttccagattacatgaggcccaagagacatgaaaacgaagttaaccttctgcccccaactgcatccagtattggaagagaaagtacattattagatcaactgacagaattggaatatggacattaaataaaaggattgtatcaatgtaaaattataaggttgattctgtacttacgtaaggcaatatgtctatgcttagaaaatatatactggcatatttagggataaaggaccatgatgatgtatataacttgtaaacgttttggggagaatgtgtgtgtgtgtgtttgtgtgtgtgtgtgtgtgtgtctgtgtgtgtgtgtgtgtgtgtagtgcgtatgtgtgggtgtgggtgtatctagtatacagggatagggaaggggcaaatgataaagcaaatgagataaataaaaccttcccaaacgtagatctgggtgaggttatgtagctgtttttggtaccattttaatttttgcaacttacttgtaagttggtagctgtttccaaataaaaagtttacaaaaaggaaggaataaatttgtcatatttttctgtttaaatcataaacctttaacttctagaaaagaagcttttttttaacttttattcagtaattatacttcttctagaaatttgtattggaataatcagtgatagtcacaaacacacactatatacatgaatatatgaatagtcatcactgtcttatcacaataaaaaatttaaacaacctaaatattaagcaaaagcagaattgttaaataaacatattcatatgtctgatattttttaacatttacataatatataccaaacatagattcacccacagcataagaatatggttatcactgggtgataatgagtggtttcagttctctttaccatgtattttaaatatactgtaagttatctctgattcacccacaacataagatggttatcactgggcattaatgagtggtttcagttctctttaccatatgttttaaatataagttatctgtagtggtaaatatttatttcataattgggtacaaagaaataataaggaatacttagaagataagtttaagtttacttttctgaaatttactaattaaccatctcccaggtaaaatttgasttgataatttagtsagagtgtctcatgaaataattttagagagtgattagtacaaaacttatttgaaagaaaaaaaaaaatgcctaaataaaaaaatgcactcagcatttattttatttccggggaggataattgctcttccatattcaggtatacttgtacacatggatcgtgttaactctagcgtctgctaattgagtactttctcatgagcagtttttgctaattttatagggaagttttcctttgctaacttttatttcattctccttagtcatactctaaatcatctttcactcttaatgtttaactttcaaaaacacacacgttttatgtgtttttgattgaggatgatttgagtagtagtattcgttattggtgggaatgtttctttcttgaagattgaaaagatatattgaaggttaactgaactgtacttggaaagaaaaatggctctgattattacatatgattggacttaagatgtcagtggtatttgtttatgttgtactttaaacttcacattagacatgaaggagaggtgttctctgctcattggtttctccagagatttcagctactttactgaactgatgtgaacaatgcagaattacttaacctggaaaagaaaagactatagaatagaatgatttctaaaatggtttccaaacatacagaatcattcaagagagcatgacggtcccttcctcacctctatgagacataaactgagagcatttgaattcaaattttagtgttagggatttggattaagaagaaaattcagaaaatgagttagcagaagtggttgtgtatttaaaaaataagtaaataaatacatacatacatcctacgctggtataaccagcatggatttaaagtgacctgacggaaaatgacggtttttggtccatcttaggcccttctagttctgcagttcagtaattcccttacccttaatccctctggactgtaattgattaattagtaacttaaagggcacacagaaacaattcagtagcctaatcattaggaaccgggagcatttagataaggacctttaaggaactcatgccattagaatcttagaatccacctgactaagatggacgtgtgtcagggatccccttaaatcatgagctacctaaatgcagacaccggcactattgactcctttgcttcaacagcttttccgcaagtaaaatgtcatagaaagtattatagatattaaacttcactcggataaaaggaagtaggggtgggcatccactcatttttgacactcagcatatgccagcctgcgttctttttacatttctcctgtttttgtctgtccgcatggtaagctccttcacagcagggtccacatctcacaccagagtgttcttatgtggtagatgctcaatacacggatgctagtgataaatagttttcttgaccattaagccacctggttgattaattagtattttcagtttttaccagtatgtgagctttgctagatttttttatacccaactctagaattagcagtaggtatctgacctagattgttttagtaaaccatttcaaaaattaagtgtatgtcttaagataaaactacagatagtttcttttgtgagaaactgtaatattctcacaaaaataaaagtacagactggttactgagacttcagattggaaagtcaggagagattttcaatcttcgtttcttcccactaaatgtactaaaatagaaactgttgttgtttttaactaaaatcagagcagactggaattacggaaaagaatattatgaatggttctatatatatatatatatatatatatatatatatatatatatatatatatatatatatatatgtagacagaacttaacatttatgtttttttgttatttttaaagtccttgctgagagcttttaggagggagtactctctaatgaataatactaataaaaataataacaataatagatccttactatgccagacctattctaagacttttgcatttagttctcacaaaaaatcctaatattactattcagtttttacttatctttctttccttttattatcttatcctgtatctatatgcaagtagtttgttggtcagcattgaacaaactatttttggtccccaaaacactttgctcacccaagagtcttcttttagtcacagaccactctgaactactgaatctagtttcatcgtcatgttatagttagggctgaagaattcctatgtagtctactcactaaggggtgtcctacctctccttccaaattgctgccttcactgcaatttctggttaggttttcagcagcttcctctgatcagcctcctttttcctgctcccaccaagaagaactcttcccattccagacacagccttgtgttttactgactgcaagaaaaaagagaaagagaatatgaaggaggccagtctaaatcggagcccttatctctcctgtaaatgatgcctttgagtagtcagtttttaaatattgttcccaaactgttgtttctgggttattggtgactcagtacatctcacccttactccttctagctcagtgggttacatcatcttctatgattaatttggactggattcagcaaaatttttctttcatttagcaaacttttattgaacacacgctgtgtgacagcaccaatgctctgtgaggtgaaaaagatattagtgctacctcgggccttagtttccctgcttatgacacatggctctctaataagggatgaatggagcttaattgacagtattcgaagtagaaataacattcagttttctagattgtagggtttatacacatttatttacagttaagtaggtgaacctcaaattsttcaggcacctattaagaaactgagtctatatagaatattggtcacgattaacagcctttgaggcttccacattcggcaaggctttaatattgtgcctactagaagggtgatttgtttttcttcttgtcyttcccaggcatacccagagtatcttatcacttaccagatcatgaagccagaagccccttcccagaccgcaacagccrcagagcagaagacctagtgaatgcctgctggtgaaggccagatcagatttcaacctgggactggattacagaggattgtttctaataacaacatcaatattctagaagtccctgacagcctagaaataagctgtttgtcttctataaagcattgctatagtgatgaatagtatgagtaactgatacatactcaactgctactgttccctttgaggaaatgtttacaggggcggccttttaacatatctcaggctcattttcattgcaattatccatttctaaaacaagattgcttcgatctagacttggaaatggaaaataagaaaaccaatgctttttcaaatgttcacaattcacacactacatttgttttgttatgcatgacgtgtctataacaaatatacacatacgacaggcaacaagcttgtttttgatttgccagacatgcatcattggctattgtttgtttgttttttgtttttttgtgttttttgggttactttgaaaatgagccagagccttcttgaggatattttgcacaaagtcacgctgacaaaatcattagcagtgcaacccaagcttctggctgagcaagattcagtttccactttttaaaatttttttattttgctctgtagctgcacttctcgttatcataaattgagatgaaaaggaaaaaacatcaagttttagtacctttttatgaattggcctatcttacaagagaagggcacaaacaccaacctgacttaggaacgcctaaattcagagaagtcaaagccggtgaaggccacttgctctttccaacacaagcctgccacagaggtcttcgggacagtactggagatgcaggttgacacrggcttgagttccaaggtgaaaaaactggggaggctgtgaaggaagagctgcattaaggagggtgaggagcgtgtggttctgtatcatggcagccccaatggatccaggggatgcctccaaaaaatacatgcttcccttcccttaatctgtactgttgggattgttacccctccaaattagctgccttatttcaaaagtcagtgaaattactgcacttgatgagggtcacaaaaataccacttgattgtttctttagttgagaatgctgggattcagactcgaatagtggatagatacacacaaatgcaaggacttttttgtttactccagatttggggtttattttgagtggcatgcttcaaatagttcataaagatccttgcattaaatttctgaaccatttcttcaaacttcttagtgtgtttagacaaggagaacaaaaattgaaaccaaagccctttctgttattttttcaatgaaggtgagaaagaaataccatacaattttctttgtgaaattactgtttattttcatcaacatttaccaagtgccattgacatttataaaaaaaatgatcctttatagttcttacacttgcccttttcaccttaactgaatatgaattgagtgcactaacttatttacttgatatactgtgcatctactctgctttgaagcgaaagaaatataaacacgaggaggaataggaaagacagtgtgacacaaacttgccattgcaattcaaagccctgaaaacgatgggtttaatgcaaggtgattaagctgtgacctcctttaatctcctgaagcaaaataaaatggttacatgcaaaacttctagaaatagactcttaaaatatatacattttgctttgattttggcttcaacccagtgctggaactaggcatccagactagtttgaatgtttgtagctgaatttttatgggtcctcaaaattaaatcgagaattagcctcagttgttgcttcttttgaagtttcagtgacccaagctgggtgtttgtgtcttggctacttgtttaatagcactagaattccaggtgaagctttgagagttgatattcattaagagggctttttttccccttctttccttctcttttgctgtaacaaagggttgaagaaattgccatctgtgtagttttcagtagctgtcaagtgtgtcttacttaccttcccccagacgtagtttaaaatggtaaacacagctgtgatttttagttaagtaaaagagttaatatgatatagatatggaaagctttatggcttcattaaaaagataaaccactacctaactgtggttgtatgttgtttccatcatactaactagatgaatggatgcgccagttttcatcttggtccttacacttgagaagttaaactgtggttcagtatttaaactgccagtgttatacgtctcatgctctgtgtgccaggtgaaggtactgtgtaaggaagacatttgcggtgcttcttgtcctataatgattcaagtatatagtagttcttgaaagagtgtgcatatattactcatctgcttaagagagtgggttaatggatatatcagaggagccaaatacatttttttcagaacttgaaaaccaaaggtcatcatgagtgcactcaaaagttaggacaagtttattacatttgggattttcatctgtagccgtatgaagaaccctttccaatataaaagcatggcattaaattaggctgaagtcttttattttttgtatatgtactatatagaaatactagcaagttaggatcatccaatatggcctaccccgaaatggcccctctgtttccctaaccacatggaagaaagaatctgaacgtctccaccggctctacccgagttccaaaactaaagggcttctccagacctgatggttccagtttacctgctgttggcctgctggatacttgactcaggcataaattaagtgccctggtcccgaactttctccctgtatttgacctccttccctctttcctaaattactagtctggaattaaaattagctccagcaatgacctttgactccattcattttctcctcatcttgggtcttaaaaaaggagaccagatacctcctagcttttgtatcacaaccaggaatgggtattaggcctcatgcgctttgctcagaacactgccgctttgttaacaaatgacagcatggaacccagagttttgattcgatgcaaaataacagcagtgcaaccaggattcttgttttccttttccttcttggagtttggaatttctagcttttcaagcagcataagtagaatcaacattaggatgttttcatgaaatagcatccttatacttctttgagcttgatgttagtggctagactgatttccctttgctctcaaaatacaaagtgcattgaagtatacagagaaatgcctgaatatggcaagcaaataatgtagattaacattctattattgtatccgttttacaaaaaataaaattttgatatatgccggagaacggcattagaatgcaataagttgtctaggtttttctgtttcagtgtctctcccaatggcacgaagggttattgggcattgtccccacccccgcctttttaacatgtgcactatctggattcctgtaaatggccttgcaaacagaagtggtgtgtattttcaagcacctttcccccattgtatccgaatccctcttgtgtgatatctgtgacaaatagccttcttcttgtgttttctgttggactaattgtctcacgtaaagctatagaccttactaatttggcaggtattcaaaactgccattaagataggatttcatgtcagatacgtatttaaagagtaaagtcaaatttgtttaatgtcagatcagtgacagaagtgaaaagaaagtaattgtgaaagtgatgtttgagctattgtacacatctagcatatggaaagcaaatgcactcgaaaactactattctagaacatgaggcttcttcagcaacttgtgcactctgccattaataaattaaatttttcccctctagaaagccttaactatggcggaaactttttaaccttttatattttaataaataaaacattgtagtcccatttcttagtgtttgaaaggtgtgtcagtgagtcggccatgtctccatgtgtttcagacctgttcatcttattttatgatggtatatttcataagtaatattcccttacatgcaatggagctgattaaaattaatccatttcaatttctccatattggaacttcctcagctaccagatttctggtttggagaagtgctggaaagatttcaaagcctattcagttgtgtatgtggggatacgacagcaactgtgataccttgtagaatatgagtgatatgcaagctgtgttttttaattgttttaaaatgtaaattatggttatgctaaagtgaaaacctagaggaagctaatgattttatatactttgcacgaccaaatatggtcgtagtatgacgagttttatacattgccagagagttctgcctcctctgaaataacattcgcactgtagattgcatttcggcttttcctcctttcacattcttttttgctttacacttcacgtcttcgcacctgccctacctcccatcctttcaaagaggtttctttcacgttccagaattcagattgttctgtgatttcttttacatcagtctacccatttctgcaggcagccctgaaagcccttgtgttgattcagagtgtttgcagagaaatgcagttgaaccctggtagtggggtgtccctcacacacccgcgcacccctcccaaagttcaggatgaaaggctagaaaacccattcaaagttaggaaagaacacagatctttgaggccgatagcctagacctagaagatgaccttgagtatgtaaacattgtctccgtgacacaaaacactgaaactcttcatgtgcatataacacctgcttctgctcccattgtttcaagctcatcttatctttgtagtagtaatgtttgtctttgatacctacaaactaaaaaggtacttttatcaaggtttctcaaaacatttacaaaaccagctttgagaaaatgttatgttgcctggcaacagcactcggagtagtaattgtgttttctcattgtgatgttggtctgtgtgagcaaccagtgtagtgactctttggttcattattsgtgttgtttttatttttagtctctgtgtgacccaacagtggcaggggttacaaccccctctcctttcttttttgtatttatctatttgtaggattgtcagatcaagtacaagatgcccagttaagtttgaatttcagagaaacaatttcacgttaagaatgtttcatgcaatatttggcatatatttacagtaaaagcattcattatttgtctgaaattcaaatttaactgagcatgctggtttttctcattgtttggtttttctaaatctggcaatcctacagctgtggtcatgggaaatcacctacagcatgttaaagtcctctagtcatcatctcgtcacctgaaatggaagtcctttttccctcaccctccacttctttccaaaggagggcatcaaggaacttaacctgcctgcctggtgggtttctatttaagacatctttgtgattatatttaacctgcaattgtgctttggcttaatgtctagctcactgtacttgtaaatgattaatattcaataaaaccatttttaaagtacacttgtgtggatagcagttagctcttaagtattttcattttgccctgcttgttcatttctgcctgaccaaccttaacacaactgacttgaaaaactgtcagaatacaaataccaaccctccctctccatcttccagtgagacctgggttttaagtgacttatcctcacgtctcagcccacatggcagttactgaataacttctgcaatagcacgggcaacatgggttcctttcagaaatatctcttaaacaaacaggctgacactttagagccagacctcctaccaggtccaaaggcagcccaggggccttgcacaacatgattgctcacagactcaccttctccacctctcgggggagacggaggggaagaacgcctgcttcatgcaacagtcagtattaaatacttagcacagtgcctggcgcagaggactaagaaaatccttccattcttcccctcttctttctccatgcctaggggtccgttacatagcaaatttgaacctagaattttatctgtacagtaacttttttgccagagggcttgtcagagcaacaaacagacataattaaatggaagtattctagtaaccctgcaaataacaatagccatcattgagcccctacgtgaaccaagtactttgtatacatacattttcattagtaaccccaaaaactttgcaaaactggccttttaattctgtttcacagatgaggaactgaaactggaagtggttaaattagttatgttatatcccagaataccttccactataagactaagtaccagaaggccaggcgcagtggctcacgcctataatcccagcactttgggaggccaaggcaggcggatcacgaggtcaggagatcgagaccatcctggctaacacggtgaaaccccgtctctacaaaaaatacaaaaaattagccgggtgtggtggtgggcgcctgtagtcccagctactcgggaggctgaggcaggagaatggtgtgaacccgggaggcagagcttgcagtgagccgagatcgcaccactgcactccagcctgggcaagagagtgagactccatctcaaaaaaaaaaaaaattaagtaccatttgctatgtaccaatcaccaatcacagatggagtttcagtgtttaagcaggaataaaaacacagacttgactctaccacatgattttatgtcagtatctcacacaacaatcagattctaaatgccattagactcaggtgttcccttttggttatagaaaaggaaattatagaggggacaactttgtgaataaggggttatagaaagggttatagaaatagaaatctgaattgtgcacaaaaagcaagtggaatataaaacagtaacttaaaatttcaaaagcctgggttagtttatgacatggatgtattccaagggcctgtttttgtagcatcaaccactgtgggttggggattgggggaagtgggatggagcagctgtaaatcacttgctggattgggtttattttctgaaggaaattacttgctggaaaactagatcctattaatcaaagggatgggtgcttcttggtagccagttttgaagaagtatttttggattacgttgtctacattgagtgtctggatgctgtgacctagtttctcacattagaggtagcgtgtcctatttatagcacctgtcaacctttatcatttggctaggttcacttttcttcattatcgtataagactgtacaatagacctccaagctgaaagagcacctgacactatactggaaataatgaaagttgggtcatccatt

SEQ ID NO: 93651 - DNA, 193843 bp, Homo sapiens
  misc_feature (1)...(193843): n = A,T,C or G
aacaggtcttgctctgtagtccaggctagaatgcagtagcatgatcatagctcactgcggcctcaaactcccgggctcaagctatccgtccctagtagctgggactacaggcatatgtcactacactcagctaattaaaaacttttttttttttttttttataaacagagggtcagccaggcatagtggctcatgcctgtaatcccagcactttgggaggccgaagtggacagaccacttgaagtcaggagtttgagaccaacctggccaacatggtgaaaccctggctctactaaaaatacaaaaattagccaggtgtggtggcacgtgcctgtaatcctctactcaggaggctgaggcaggagaattgcttgaacctgggaggcggaggttgcagtgagccaagatggcgccactgcactccagccccagcctgggtgacagagcaagactccgtctcaaaaaaaaaaaaaaaggctgggctttgcagctgacgtctgtaatttcagcactttgggaggccgaggcaggttgatcacctgaggtcaggagttcaagaccagcctggtcaacatggtgaaccctcgcccctactaaaaatacaaaaaaaaaattagctggacatggtctgtactcccagctactcaggaggctgaggcaggagaatggcttgaacctgggaggcagaggttgcagtgagccaagatcatgacactgcactccagcctgggtgacacagtgagagactctgtctccaaaaaaaaaaaaaaaaaaaaaaagacagggtccagttctgtttcaagttcaaggtcaggctggtcttgaaatcctggcctcaaaagatcttcctgcctgtggctcccaaagtgttgagattacaggtgtgagccattgttccctgtccccagatagctcttttaaagcctcattaacattctatatttataagtgatattagtaatcacacatttgtgaaattaccttgcctgaagaaaacagaaattcaaaaatggtttttgcttcaccctctccctccaatgtcactgccctcccatctggtccttaagtttaattttctgttgcagaatttgttttttaagtggccactgctcacccttccctcttcccctctgttctccatctgctttttactttctgtcctttccctcccaagattgatggccttggcacatgtgactggatcattttttttttttttttttaagagatggagcctcactctgtcacccaggctggagtgcatcggcacgatctcgggtcacttcaaccactgcctcctgggttcaaacgattctcctgcctcagcctcctgagtagctgggattacaggtgtgcgccaccatgccctcctaatttttgtatttttagtagagatgggttttcgctatgttgaccaggctggtcttgaacttctgacctcaggtgatctgcccgcctcggcctcacaaagtgctgggattacaggcatgagccactgcgcctggccttgtgctaattttttttttttttttttgaaaaagagtcttgctctgttgctcaagctggagtgcagtggcgtgatcttggctcactacaacctccacctcccggggtcaagcgattctcccacctcagcctcctgagtagctgggattataggcacctgccatcatgcccagctaatttttgtattcttgtagagatggggtttccccatgttgaccaggctggtcttgaactcctgacctcaggtgatctgcccaccttggcctcccaaagtgctgagattacaggcatgagccacaactcccaggcccttgtgctgatttttgaaggcagttgaggaagcggagaaacagaggcagcaatctttggtgttctccacttgtagatgtatcattccaacctttgcctccttcttcacattaccctcctctctatgtttctctgtgtcatatctctctttccccttctcttataaggacacttgtcattgggtttggacccatcctacatccaggatgatctcatctctcaagtttcttattgttgactgggtgcggtggctcacacccgtaatcccaccactttgggaggcagaggcaggcagatcacctgaggtcaggagtttaagaccagcctggccaacatggtgaaaccccgaatctaaaaaaatataaaaattagctgggcatggtgtcaggtgcctgtaatctcagctactcggggggctgaggcaggagaatcgcttgaactcaggaggtggaggttgcagtgagcagcagagattgcaccattgcactccagcctgggcaacagagcaagacactccctcaggaaaaaaaaaaagcagctgggcgcggtggctcacacctgtaatcacagcactttgggaggctgaggcgggtgatcatgaggtcaggacttccagaccagcctggctaatatggtgaaaccctgtctctactaaaaatacgataattagctaggtgtggtggtgtgggcctgtagtcccaggtactctggaggctgaggcatgagaatcgattgaactcaggaggtggaggttgcagtgagccgagatcatgccactgcactccagcctggttgacagagtgagactccatctcaaaagaaaagaaaagagaaaaaagaaaagaaaaagaaacataaggccgggtgcagtggctcatggcctctaatcccagcactttgggaggccaaggtgggcagatcacaaggtcaagagattgagaccatcctggccaacatggtgaaaccctgtctctactaaaaatacaaaaaaaaaaaaaaagaacatagctgggcgtggtggtgcacccctttagtcccagctactcaggaggctgaggcaggagaatcgcttgaactccgcaggcagaggttgcagagagccgagatcatgccacggcactccagcctggcgacagagtgagactccaactcaaaaaaaaaaaaagaaagaaaagaaaaagaaaaaacacaatagatggaatagaactgcagaaaaatatggcaaacacattatatcttttttcaaaaataaaaattaaaaaattgctcaagggatccacccaccttggcccccaaagtgctaggattgcagatgtgagccaccacacctggccaacacattatatctctaacataaaagaggttctataaatggattttaattaaattaattaattaattaatttatgttttctgtttttgagatggagtctagctctgtcacccaggctggagtgcagtggcactatctcagctcactgcaaacttcgtctcccaggttcaagcaattctgtctcagcctcccgagtagttggcactacaaatgcccgccaccatggccggataatttttgtatttttagtagagacggggtttcaccatattggtcaggctggtcttgaactcctgacctcaggtgatctgcccgctttggcctcccaaagtgctgggattacaggagtgagccacagcacccggccatgcatttctattatttatttatttatttatttttgagacagagtcttgctctgttgtccaggctggagtacaatggcgtaatctcagctcactgcaacctctgcctcctgggttcaagcgattctcccaccccagcctccagagtagctgggatcacaggcccgcaccaccacgcccagctaatttttgtatttttagtagagacaaagtttcaccatattggccaggcttggtctcaaactcccggcctcaggtgatccacccgcctcggcctcccaaagtgttgggattacaggtgtgagccatcattcccaacttattgtgttttttctttttcaaaacttatcactgtgaggtcatgcaaaaccttcaaaatatttatgtaggcaaatatttttcttttttctataatggttctgggcttcctgtcttgcttaaaatttctgcctcattggccagtaatcacatcacttttgggaggctgaggcgggcagatcacgaagtcaagagatggagaccatcccggccaacacagkgaaatcccgtctctactaaaaaacaaaaaattagccgggcatggtggtgcgcgcctgcagtcccagctacttgggaggctgaggcaggggaatcccttgaattcaggaggcggaggttgcagtgagccgagattgtgccactgtactacagcctgacgacagagcaagactccgtctcaaaaaaagaaaaaaaaaattaggcgtgtgtggtggcgggtgcctgtaatcccagctactctggaggttgaggcaagagaaytgcttgaacctgggaggtggaggttgccatgagctgagatggtgccactgcactccagcctgggcaacagaatgagactgtctcaaaaaaaaatttttttttcctcttaagtttctgttttgtaaatttttatattttttaattcttctggattttttttttttttcctagacagggtcttgctctatttcccgggctggagtgcagtggtgctaccgtgctatctcgactcacaccagcctcgacttccctcgacttcctgggttcatattatcctcccacctcagtctcccaagtagctgggacaacagatgcacatcaccacactcacgtcatttttgtcagtctcgccatattgcccaggctaggtgtgaactcctgggctcaagtgatctgcccacctcggcctcccaaagtgttggtattacagcctcttctggaatttatttttcaatgttcttgctttaaatcgaaagtcaattaaaaccaggatcattggccgggcacggtggctcatgtctgtaatcccagccctttgggaggccgaggcgggctgatcacctgaggtcgggagttcgagaccagcctgaccaacgtggagaaaccccgtctctactaaaaatacaaaattagccaggcgtggtggcgcatgcctgtaatcctcaggaaggctgaggcaggagaatcgcttgaccgggggacgcagagttgcggtgagccaagatcgcgccattgcactccagcctgggcaacagtagcgaaactctcattcaaaataagtaaataaataaaaaataaaaaaactaggatcatttctcaaataaactattggtttgtcacttaattgatttgtcacgtttgctttttattatgttgtacttctagattttatccctgactactcaactatttgtccagggtaatataggagcattacgttagaatatactagctttggagtgagttaaaatgttggttttcagtaagtaaaatttaagtgtcccactagaaagaggactgtgatttttcgcggttggggtcaaaggtaacaggaaacaaggtaggcaaaaaggggtaaagtttaaggctctgcagacaaatgttaggtgttgttactgcaaaattgaacaaagaacaagaatcttgggcttgaaagcctggacttttccctagaaacaaccattcacagtgtagggactgaagggccagctgtgaggcagccgagctagcgccctatcctcacaaagggagtgaaagacggagacgggtatcgggaaaaaaataagtgctgcgtccaagaatttaggagtcagtccatgtcgcagaacagggagaagggctgggaagaaaaggccagcaaggaacctaggaagagcggaatctctcgggaggaggttatggaggccgcagcgggtgatgggtctctcctgaaggcgacttgccggggattccctattccgcagtcctctgggagtcgcaaagagagttaggaaaggccgtgcagcagcgtcgcagccgggctggcaacggtagaggaatcggcagtgaggcctctccccacaccctgccagcccaactgccgccgccgccgccgccgccaccgcggggcccgggattggcccgagggcggcgcagggcggggcgggggctgctgggatgcaggcctgagaggctggcgcgcgcgcacacgggcgcgggttcggcggcggcgcgcgcgtgctctgtcggcctgtgcggcgctgcggcggagcgggccatggcagtggggagggggcgagtgtagtgctgcgcggggcaggcgggaggtgatcgagagaggcagggatgggggcgccggagtggagcggttgcggcggcctgggctgctgactgcgcacttggaatagtagcaggcggcggcggcggaacgccaggcaggtgagtgcggcggccgggacccggatgcggcgcggctgaggggcggctgggtcgcggcgccggctgcggtgcccccgggcgtgctggcggtgcgttctagcttgccgctacctgcggcgctggcgactcttgtggttgcaccgcgcttcctgccagcttggaggataaccgcctaccggccggtgggggcgtctggcttggttgcggcccgccctgggctctccaaggtgagtggcgccccccggcccctgggcggcagagacgctgccgggcgtcccgggtcactgtcgctttgggtcccgttcctgaggggcgtttctgtggagagacggcgtactcgcgccccgcgtctatgcggacacctccggaacttcccgaccctcaggtgcctttttgcgcagaagtgtatttcagaggcgtggacccagggttattaggttatggacatgttttcgaatcccaacgccgctgctgaccagtcctggggccttgggccaaaatatcctgatgtgttaaatggaaataataatacatacaccataaggttgttgtgaggttaggcataactgaacaagtgctaagtaaatgatacccctgctgcagcatctcgtgttagctattgctaattcctggctgctggcgtgcgtttgggggcacatttatttccgatctgctctggtgttgcagtaaccgatactggagttgcttaatattggagcctgttaacytcgcagtggccaaaatagaatcctatagtcccttactagaatcctgcagtctcttcccgcagggctgaattggaaccctgtctcaggtactgagtgggaattaytgctgaaatgaaaccgagcaaattcgggattcgcttaggatgaaagatggtgggacgtaaacttgaagtgctttgctgtttcatctcaagtgacacttgaactctgccacttgttacagagttataaacacacgaagagtatggaaacagactcttttttctgcattgctacatccaaagggagtgacaagtgcttttgtaaacatcattgtgggcagtgtgactgtctggtgaagtcatgataattaaatgagtacttattttgaagcactgaatggaagtttggagatatgattcgtaataaaattgtctccaacgagtcagaggtctcagcagttcattaatcatttggggatttttatgctacattgtaagattttatggtaaaagcagaactgtttaagtcataataatgtagcacaggaaagggtggtcagataaggatcttaacccagtttcagaatgcaggtatggaagaaagtaaagtcttttttctgaccaggtgcgttggctcacgcctgtaatcccagcactttgggaggccgaggcgggcggatcaattgattccaggagttcgacaccagcccaagcaacatggtgaaaccccgtctctaccaaaaacacaaaaattagcagggcgtggtggcgggcgcttgtaatcccagctacttgggaggctgaggcaggagaatcccttgaacccgggaggcggaggttgcagtgagccgagatggcaccactggactccagcctgggcaacagagggataccctgtctcaaaaagaaaaaaaaaaaatctttttgagaccgaatcttgcttcttttttaaaaaaaaattattgttgttttttgaggcagggtctcggtctgtcgcccaggctggagtgcaatgtcgccatcttggctcactgcaacctccgcctcctgggttcaagcgatcctcctgcctcaggctccctagtggctgagactacaggggcgtgccaccacgcctggccaatctttcaattttgtttttttttttttttttttgagacggagtttcgcttttgttgtccaggctggagtgcaatgacgcgatctccagctcaccgcaacctccgcctcccgggttcaagcgattctcctgccatagcctcccgagtagttgggattacaggcatgtgccaccacacgcggctaattttgtactttttttggtagagacggggtttctccatgttggtcagggtggtctcggactcccaacctcaggtatccgcccgcctcggcctcccaaactgctgggattacaggaggaagccaccgcgcccggcccaatctttgtatttttggtagagaggtggttttgccatgttggccaggctggtcttgatctcctgggctcaaatgatccgccagcctgggcctcccaaaatgctgggattacaggcatgaaccaccgcgaccggccgaaagtaaaaatcttaaaggtttaaactggaattgtattcactaaagccaaaatgacttaagaagcaaaaatctaatttacacccctgattcacaccctgagtccaccaccttcggagtgttttttagaagtgttgaaaatcaagtcgggttttgatttgtcattttgcacctcttgcctatctttcttggtgttcttaaagactcatccataaaggcttttgcttcaacttgctttgtgaatgtcagccaactatatggaaaaaagtgaaaaatgaacactgtagtctaaattatgttctttcttgaggttttcccagttgtctagcttagactgttgaactcaacagtagaactactgctagccactgtgaaaaggctgggagtcagaagtcacctcttggttttaggcctcaacctgggtaaaaacagctggggctatggggatgttacccagtcttatgggcctctgttttgtttgtttgtttgttttgagatggagtctctctctgtcgccaggctggagtgcaatggcacgatctctgctcactgtgacctcccgggttcaagcgattctcctgcctcagcctccaaattagttgggactacaggtgcacaccaccatgccccgctaatttttgtatttttagtaaacatggggtttcaccatattggccaggatggtctcagtcttttgacctcgtgttcctcccgccttggcctcccaaagtgctgggattacaggcgtcagccactgtgcctggccccaataaataaattatttatttttattttttattttgtttttatttatttacttatttagagactgagttttgcccttgttgcccaggctggagtgcaatgtgcaatcttggctcactgcaacctccgcctccccggttcaaacaattcttctgcctcagcctcccragtagctgggattacaggcacccgccaccacgcccagctaattttttgtatttttaggggtttctccatgttggccaggctggtcttgaactcctgacctcaggtgatctggccgcctcggcctcccaaagtgctgggattacaggcgtgagccactgcgcctagcactatttttaattttwatttaatttaattttattttattttattttatttatttgagacggagtctcactctgtygcccagcctggagttcacacctcctgggttcacgccgttctcctgtctcagcctccccagtagctgggaccataggtgcccgccaccacgcctggctaattttttgtattttttttttagtagagacggggtttcaccgtgttagtcagggcggtcttgatctcctgacctcgtgatccgcccgccttggcctcccaaagtgctgggactccaggcgggagccaccgcgccttgcccccaataaataaataaaatacttaactgaggaaagtgagttcctgctttattattattattattattattattattattattattattattattattttgagacggagtttcgctctgttgcccaggctagagtgcagtggtgcgatctcggcttaccgcaagctccgcctcccgggttcacgccattctcctgcctcagcctcccaagtagctgggactacaggcgccagccaacacgcccggctaatttttttgtgtgtttttagtagagacagggtttcaccgtgttcaccaggatggtctcgatctcctgacctcgtgatccgcccatctcggcctcccaaagtgctgggattacaggcgtcatccactccggcccctgctttattatttgtgtattctcttggacttgttccttttgattttttgttttgttttgttttgtttgagacggagtcgtgctctgccgttcaggctggagtgcggtggcgccatcttggctcgctgcaacctccgcctcccgggttcaaggaattatcctgcctcagcctcccgagtagctgggattacaaggcgtgcgctaccacgcctggctagtttttttgtatttttagtagagacagggtttcaccatattggccagactggtctagaactcctaacctcaggtgatccgcccacctcgtccttccaaagtgctgggattacagaggtgagccaccgcgcctgggcccctttttttatttatagaatttggcttaccgtggtgggcagggggtggttgtggtggtgtactagaaaatcacattatgtaaaggaaccttctaggataytcgagttttatggctttcctcctcttcactctctttgacttttccttctcttgttgagttcaaaacattctaatgccccagggcttccggcctgtccctattcctttctctacctgtattctttctgaatgatctcatgttgtcctgtcctgtggtttatttatttatttttagtagagaaactaaaaataagtaaattgttgtcaactgctgttgcctctcaagatttttatctccagtcctgaacttcagtcttctgcctgcctacatgacaccttcatttcgtctgtttttaggcgtctttcaatgtaatgggttcgcatggatctcttaattcccattcttattccttccctagcagttttctttcttcttttttgagatggagtttcgctcttgttgcccaggctggagtacagtggcgcaatctcggctcactgcaacctccgcctcctgggttcaagcgattctcctgttttagcctccgaagtagctgggattataggcgcacgccaccacgcccggctaaccctagcagttttcatgtcgtagcaccccgctgccccactcaccatcctgtttgagtgtaaaatctagtggttatgtttaatttatccctttgtctcatcctccctcactgtacgctcagccaatccttgagcacactctaaattttatctccaaaatatatcccacatatgtttattttcatttccactaccccagttcttcctgggtagtaccttcctaactggtctccttgcctctgttcttactctatttttcacacagcagtcggagtgatttttacttattctcctgttccagtggattctcattacactaagaagtaaatccaaactttatctgcatgtcagcgaattgtttatttttattttattttatttttaaaatagagatgggatcttgctatgttgctcaggggtcttgaattcctaggctgaagcaatccacccatctcagcctttatttatttttattaaattttcctttatctgtcataatctgtttgagtgctaaaaaataaataaaataaaaaaatttggccggacacggaggctcacgcttgtaatcccagaactttgggaggctgaggtgggcggatcacctgaggtcaggagttcgagaccagcctggccaacatggcaaaaccccatctctactaaaaatacaaaaaaaaaaaaaaaaaaattagcctggtgtggtggcatgcgcctgtaatcccagctattctggaggctgaagcaggagaatcggttgaacctgggaggcggaggttgcagtgagccaaggtgcaccattgcactccagcttgggcaacaagagtgaaactccgtctcagaaaaaaaataaaaaataaaagataaaatttttttagaggcggggtctccttatgctgcctaagctggagtccagtgggcattcacaggtagtattatagggcactacagccttgaactcctggtctcaagtgatcctcctgcctcagtctccccagtagctttaggcacatttcacctctcccagcttgcttattttattgttcatttatttatggtctttttcctccaatataatataagcttcatgatggcagggaccttgtcttccctggagtattttcaggaaccagaacaatgcctggaaaatttaactaatggggctgggcgctgtggtttacgcctgtaatcccagcattttgggaggccgagacgggcggatcacaaggtcaggagatcgagaccatcctggctaacaccgtgaaaacccgtctctactaaaaatacaaaaaattagccgggcgtggtggcgggcgcctgtaatcccagctactcgggaggctgaggcaagagaatggcgtcaacccgggaggcggagcttgcagtgagccgagatcgcgccattgcactccagcctgggcgatagagcgagactccatctcaaaaaaaaaaaaaaaaaaaggaaatttaattactgttgaatgaataaatgtaggaatgaaattagttctaaaatcttttgattgaatgtacaatgtatatcctgaacacacttccccctttttttggttccggatttgggcaaattagacagtaaccagagaccctagagttattattctatcaggtacctttttttgttttgttttgttttttttgagacggagtctcgctctgtcacccaggttggagtgcagtggcgcgatctcagtttacttcaagctccgcctcccaggttcacgccattttcctgcttcagcctcctgagtggctgggattacaggcgcccccaccacgcccggctaattttttttttttttgtatttttttagtagagacagggtttcaccgtgttagccaggatagtctcgatttcctgaccttgtgatccgcccgcctcggcctcccaaagtcctgggattacaggtgtgagcccccgggcccggcctttttgttttgtttttgaagagaccaggtctggttctgtcacccaggctggagtgcaggggcacaatcgtagctcaccgtaacctcgaactgctgtgctcaagtgatcctcctgcaccggcctcctaagtggttattaatagtactataggcatataccatcatgcctgcctggctaactaaaaaaaaaaaaaatttcttaggtagaagacacaggctcttgctatgttgcccaggctgggtctcatgctcttggcctcaagccatcttcctgccttggcctcccaaagtgctctgattacaggctagagccactgaacccagccttctattaggcgttcttaactctctcaatcttcgttaaggtgctctacccctgaaaagaccaagcctttagacattaagcaattaatgacaaaaacgagtgtgaattttgttcactgcgtcctgaatcattagtctttttgaaaataaggaaccaaacaaaaccaccttgttttgtccttttgaggccttgaattttggtcttgactgaaggggactggttttaggatgtggtagtttgatcctgtattcaatcgtatttagtatttttagagatcaggaatatttatttatttatttatttattgaccgagttttgctcttgttgcccaggctggagtgcaatggtgcaatctcggttcactgcaacctctgcctgctgggttcaagcaattctcctgcctcagcctcccgagtagctgggattacaggtgcccacaaccacgcccagctaattttgtatttttagtagagacggggtttttaccatgttagtcaggctggtctcgaactcctgacctcaggcgatccgcctgccttggcctcccaaagtgctgggattacaggcataagccactgcgcctggccaggaatttttagtttaattagacaacttagtttttgaatctgagaccctcccattgcacacgtgtgtgagagagtgtatgtgttgtaagaatgtatgtgtatgtatgctctgaactatttggtttagagttaccatatcttttttttttttctcattaaactttgttttgatgggtctcaaaattctgtgaccgatttttggtccagttgtttccattaaaaactactgattttaaaagttaataatttaaaactgccacatgccaaaaaaaaaaaaaaaaaaaaaacccaaatggtccataacacattctccttttcttctgaggggtttacagtgcattgttatcattaaccagtcatttactattaaacctaaatggctgattgaaacaaacatttctgaggctattcttccaccactgattaagactcaggtggcaggtattagggataatattcatttagccttctgagctttctgggcagacttggtgaccttgccagctccagcagccttcttgtccactgctttgatgacacccacggcaactctgtttcatatcacgagcagcaaaatgacccagaggaggatagtcctagaagctctcaacatacatcggcttgtcaggaaccatatcaactatggcagcaccaccagacttcaagaatttagggccatcttccagcttcttactagaatggtgatcaatctttttccttcaggtcagcaaacttgcaagctgtgtaagctgtgtgacaatccagtacagtggcatagccagcactgatttggcctgaatggttcaggataatcacttgagcagtgaagccagctgcttccattggtgggtcatttttgctgtcaccagcaacgttgccgtgatgaacatctttgacagacacattcttgacattgaagtccacattgtctgcaggaagagcttcacccaaagcttcatggtgcatttcaacagactgcttcagttgtaacattgactggagcaaaggtgaccaccattccgggtttgagaacaccagtctccacttggcctataggcacagtaccaatatcaccagttttgtagacatcctggagagacagatgcaagggtttgtcagttggatgagttagtggtaggatgcagtccagagcttcgagtagcatggttcccctggcattgccatctttatgggtgactttctatcccatgaaccaaggcatgttatcacttggcttcagcatgttgtcactgttcccaccagaagttggcacaaatgctactgtgtcggggttgtagccaattttcttaatgtaagtgctgacttccttaatgatttcctcatatctgtattggctgtagggtggctcagtggaatccattttgttaacaccaattagttgcttcacacttcagcatataagccagaagggcatgctgacaggtctgcccatttttggagataccagctttaaattctccgacaccagcagcaacaatcagaacagcacagtcagcctgagatgtccctataatcatgttattgataaagtctctgtcttcttgagcatcagtgatggtcacgtaatacttgctgttctcatattttcatagggagataccaatggtgataccatgttcatgctcagctttcagtttatccaagacccaggcatacttgaaggagtcctttcccatctctgtagctgccttctcaaatcttttttttgacagggtctcactctgtcacccagattggagtgcagtggtgcaatcgtggcccactgcagccttgacctccccaggttcaagtgatccttccagcctcccaagtagctgggagtacaggcatgcaccattatgcccagctaacttttttttttttttttttttttggtattttgtagaggcagtgtttcaccatgttgcccaggctggtctcaaactcctgagctcaggtgatttgcctgcttggcctcccaaagagctgagattacaggtgtgagtcatggcacccagcctaggatctttctttttgtgaccccccttctccccgagaatgtatatctccttcatttcttttcttttttttccgaagtggagttttgctcttgttgcccaggctggagtgcaatggcgtgatcttggctcactgcaacctccgcctcccgggttcaagtgattctcctggtctcaaactccagcgtcaggtgggtccacctgcctgggcctcccaaagtgttgggattacagggatgagccaccgcgcccggccatatctccttattttcttttaatagctcctcagatatttagcagatcacctgaggttgaccctttaactgggagtagctggcttactgctggaatcaagaatgtgaatctcaacagtcatctcctatattatagtattgctagagataggtctgcagctcagaattctccccagtgtaaacccaaggacagcatccctggtcctgtagtttgtcttctggtgcttcaggcattcaggagaccaccaggcaaatgctgatttgccctcaagggaaatgcgatcctgattatccatgcctgcagggggaggattatatggattaaactaaatccatgggtaatccaaaggctttgttttaaactacagtttaaccacattcctgaccacagttttttcttgtatttctaataactaatttataatatttactgatttcaaatttatcttcttctcctgccacttagaagtaatggcagttgtgaagttgagaaaagatggaaggagttagataaccagcagatgatttggtattaactgggtggtttagctacagtgctttctagaccatgaagacctgaattccatgaattccttacctgctgagtcattggtaactgtcaacaagagctcaaactccattttgatacatttgtactttacttgcttaaatgaatgagctcttgtgatttaagtaatcagtatttcagatgatcagaattatracccgatttgaagttttcctttactgtttaataagttagcctactgatagtttttttattttaaaaaaattttttcattattattttttgagacagagcctcgctctgtcgccaggctggagtgcagtggcgccatctcggctcactgcaacctctgactccctggttcaagtgattctcctgcctcagcctcccgagtagctggcattacaggcatgcgccaccacgcccagctaatttttgtatttttagtagagacgaggtttcaccatgttgcccaggatggtctcgatctcctgacctcgtgatctgcccacctctacctcccaaagtgctgggatttcaggcgtgagccaccttgcccgaccgttgcttttttttttttctgtagccagtctactactacatctgacaagttacgtgttcatagttatacaataactattcatatttcattaaatagttgaaatatgatcacttaaaattgtttattcttgatttagtataggccttgtatttatttatttatttttttagggatggggacttgctgtgttgcccagctggcctgtaactcctgggctcaagcgatccccccacctcaggctccagagtagctgggaccatgggcaggtgttgtatttagattctattaaagtcagtgttttcttgtagcttcataaaccattacaaattgttgccattgtgttatctgaaaaaaaatgtagtttgttaactaaaacgtttttctgcagtgataaatatcggcttgaacccaggaggcggaggctgcagtgagccgagatcacgccactgcaaatatatatatatatatttcatgtatatatatttcgtatatatgtttcatgtatatttcatatatatatttcatgtataaatatttcatatatatatttcatatatatttcgtatatatatttcatgtatatatattttgtatatatatttcatatatatatatttgcagtggcgtgatctcggctcactgcagcctccgcctcctgagttcaagccgattctcctgcctcagcctcccaagtagctgggattataggcgcatgccacacgcctggctgatttttgtatttgtagtagagatggggtttcaccgtgttggccaggctcgtctcgaactcctgacctcaggtgatccacccacctcagcctcccaaagtgttgagccaccgtacctggctgcagttacgtattttctttttctttttcttttatttttgagacggggtctcactgtgtcgcccaggctggagtacagtgtcgtgaacttggctgaacctcccaggttccagctgttctcctgcctcagcctcctgagaagctggaactacaggtgcatgccaccatgcccggctaayttttgtattttttagtagagacagggcttcaccgtattggccaggctggtctcgaactcctgatctgcccttcctgaccttgtgatctgcctgcctcggcctcccaaagtgctgggattataggcgtgagccaccatacccggcctagttatatattttcaaaagtcaagttccatatttatgagctagttatcattccccttaaattttgagcaagagttcctggggatagccaactggaattctttttttttttctggagacagggtcttgctctgtcacccaggctggagtgcagtggaaccatcttggctctctgcagtgtggacctcctgagctcaagcgagcctccccagtatctgggattataagtgtgtgctaccacatctggctacttgttgtatttttcatggagaaagattttgccatgttgctcaggctagtctcaaacttctgggcttgagtgatctgccagcctcagcctcccaaagtgctgggattacaggtgtgaaccaaagcacccggccaagctgtcttaactcttgatgtgcacattcactcaccattccattattaatatttttcctttttttatttttatttttattttttgaaatggagtcttactctgttgcccaacctggagtgcagtgacgccatctcggctcactgcaacctctccctcccaggttcaagcgattcttctgtgtcagcctcccaagtagctggaattacaggtgcctgccaccactcccagctaatttttgtgtttttagtagaggtggggttttaccatgttggtctggctggtcttgacctcctgacctcaggtgatccacccatctcggcctcccagagtgctgggattacagacgtgagccgccatgcccaggctattaatattttttctaactgaggagcttctgggttttaggtcttcattttgctcacaagtattgtctaatatctctgtaatttgtacatgatggtccagtggctcctgacctcaggtgagccacccgccgcagcctcccaaagtgctgggattacaggcatgagccaccctgctcagccctgagcattaattttttttttgttttttgtttttttttttgagacggagtctcgttctgtcgccaagctggagtgcagtggcacaatctcggcacactgcaacttccgactcccgggttcaagggatctcctgcctcagcctcctgagtagctgggattacaggcacgcaccaccacgcccagctaatttttatatttttagtacagacggggtttcaccatgttggccaagatggtctcgatttcctgacctcgtgatctgcccgcctcagcctcccaaagtgctgggattacaggcgtgagccaccgtgcccagcccccattaattctttttgtaggcattatcctattggtatactcacatgtgtggaaaatcatgtatggtgaaggctatttgttgcattattgtttataatggcaaaattcctgaagtaacttaaatgtttttcactaggggaattactttaaaaaaaataggacgttcctatgattgaatgctctgtagccatttaacagaatgaagaaagtggaccaggcacggtggctcatgcctataatcccagcattctgagaggccgaggtgggtggatcatctgaagtcagtagttctagactagcctggccaacatggtgaaaccctgtctctaataaaagtacaaaaattagccaggtgtggtggtgcgcacttgtaatctgaactacttgggaggccgaggcaggagaattgcttaagccccggaggcagtggttgcagtgagctgaaattgcaccactgcactccagcctgggcagcagagcaagactccatctcaaaacaaacaaacaaacagaatgaagaaagtgtttatgtactgatgtggaatcattttaccacataaatgagttaggttaaaaaaccacaaaggtgtggttacaatatgtggggaatactatcattgttattacatttattcctattaatgagtaatgtaataatattgtaacaggaaattctgaggtgatgtttgaattgagatgtgaaaggtgaattatgtaggtcagtgtttctcatctggggttgactgatgtttaggggctgtttcaggaatgagagcaggggacgattttagcttgtacaattattgggggatatattagcatttagtgtgcaaaggccagtcatgttagccttagtaatataaagtgtgcaacagtcttgcaaagcaaagatttgttttgtgtcctgtaagatcatcaattttcagttcacataggtgaaaacctatttgttttagtccgtaacagtggatctcaactctggctgcacatcaaaatcacttgagaaggctttattgattgattgattgattgagacagagtctcgctctgttgctcaggctggagtgcagtggcacaatctcagcttactgcagcttctgcctgaggttcaagcgattctcctgcctcagccacccaagtagcccgagactacagacacttgtgaccatgcccagctaatttttgtatttttagtgaaaatggggtttcaccatgttttccaggttggtctcaaactcctggcctcaaatgatctgcccgccttggcctcctaaagcgttgggattacaggtgtgagccacaccatgcctggcctacttaggaagtttttaaaagatgatgaggctgtacctcatacgaattatataaaaatctttgagatgatacctcggcatcagtattgtttaaaaatgtccttcttattctaatgtatagcccaggttgaaaccattgcctaaatcctaacttcattttacacataaacaaaatataaaaatggcatggttttaatattcagttttcccagaattcaccttctttggaaatctagaggagattatgctttagtttgttcagaactttaccaagagttatctttctaaaatttaaaatttatgtcaccagtggcatatgttggtagtgatttttttttttttttggagacggagtctcactctgtcgcccaggctggaggacaatggcgcaatctcggctaactgccatctccgcctccagggttcaagtgattcttttgcctcagcctcctgagtagctgggactacaggcacgtgccaccacgcctggctagtttttgtatttttagtagagacggggttttaccrtgttagccaggatggtctcgatctccagaccttgtgaaccacccaccttggcctcccaaagtgctgggattacaggcgtgagccactgcgcccggcccggtagtgatgtttaatcaccaagacaatatgtgcacatcagtctgcctttgtagctgtgatattcagtaattttaagtttaggtttaagcttcgactacctttttatgacttataatgtagtcgtaccagagcatttaccattagcatatatataattttgtactaagttatattccttttatttctctttatattacagttaagactctatataacatatacatatatgtaactaaagttttgtttagtttgtattatgtatacattttgtttccaatggtaaagggatgttatgaaatatttattattttaaaaaaggaagcattgagtccagcacatgggaaggctctttagcaggagggagcctggcattttggaggaactaaaaggaggccattctagcctgagaggagagagtgaggtcaagaggtgtgtaggataagggtgtaagatgagccaaaaagagaggtagagtccatgcagcaccttgtaggctgtgggaaggatcttggagagttgtttgactggaacaaaagctgaggcattgtgagctgtagagttgcttgaccaagtggaatttatagctgaaatggacattaaagagcatatagttaaaccatcttgttttacaaataagaaaaaggaagttaggggaactttcccaaggtcacacagtgaataaatgagctagagccagaacttgatgacacagttctttgtttctgcctgactgccaggcagaggagttagattttagacatttaggagcatattgggttttgagcgagagaattccaggatggagatggctgcatggctgtgtgcaggctggaggcagtgaataatagggagtcatgaagtcaggacctccatgattttattctstggtcaaactgaatcactaaatatgagtttccatcttgactattattttaaatagagacagggtcttactatgttacccaggctggacttgaactcctaggctcaagctatcgatagctcccacctcagcctcctgagtagctgggactacaagcatgtactaccatgcccagccccatcttgacttaagctcaattatttaatagcttttgttttccttattagagatgggatctcattctgttgccaaggctggagtgcagtggtgcagtcatagctcactgcagcctcaaactccagggctcaagtacttgctcctcccacttcagcctctggtgactcgggaggcacaagccactgtgcctagctaatagttttttgtgttggtgtacctgtctccccttctagatcgtataccttttacttcctatacattctggcccagtgctttatttatataaagtattgagttttacttgtgagttcccctagcatcaaggtttgaattgggccatcagcctactagcatctacattttatgttgctgcattgactctttacctggttgtgtattttggctcagtagttttaggggtgcctgcaaggattaattaattaatgctcttctctaccagcatattttaattattctactttttttttgagatagagtttcactcttgttgcccaggctagagtgcaatggcrtgatctcagctcaccacaacctctgtctccttggttgcagtgattctcctgcctcagcctcccaagtagctgggattacaggcatgcgccaccaggcccggctaatttttttttgtttttgttkttgtgttttttgagatggagtctcgctgtcgcccaggctggagtgcagtggcacgatctcggctcactgcaggctccgccccccggggttcatgccattctcctgcctcagcctcctgagtagctgggactacaggcgcccaccacctcgcccggctaattttttgtatttttagtagagacggggtttcactgtgttagccaggatggtctcgatctccagacctcgtgatccgcccgcctcggcctcccaaagtgctgggattccaggcgtgagccacygcgcccggccttttttttttgtatttttagtagagacggggtttctccatgttggtcaggctggtcttgaactcccgacctccagcgatccacctgccttggcctcccaaagtgctgggattacaggcgtgagccacggcgcccggccaattactatacttttaagttgtgctgaaaataaggaaatacataggacctctaaggtttagatctttttcagaatgattttttgtgtacttaattctctgtaatattagccatggattggtcctattatggtacatcatctgctcacccaaatgaggtgaataaaccctcagaattcttgataccatttggtgactcacagtgagggtaggctcattgttactagcaattaactgacaatctccagtgaaactgtcaccttgtggtttctattttttattttttaatttatatttatttatttatttatttatttattttgagacaaactctcactcttgtccccaggctagagtacaatggcatgatcttggctcactgcaacctctggcctcctgggttcaagtgattctcctrcctcagcctcctgagtagctgggattacaggtgcttgccaccatgcccggttaatttttgtatttttagtagagatggggtttcaccatgttggccaggctggtctcaaactcttgacctcaagtgatccacccgccttggtctcccaaagtgctggaattataggcgtgagccaccatgcccggctggtttttattttattttaatttatttactttttagagacagtgtttcactctgttgcccaggctcactacagcttcaatctcctggtctcaaacaatcctcccacctcagcctcccatatagctggtaccacaggcatgcgccactatgcctggctaatatttgtattttttgtagagatagaggtttcgccacattgcccaggctggtctcaagctactgagctcaagtgatccacctgcctcggtctcccaaagtgctgggattacaggcatgagccattgcacccaacccaccttgtggtttttaactaccttattcaaatatgtaaaaagattatcactgagtgtgtgtgtgtgagtgaaaaatacctaaaaagaggagcagttgctgccatgtattgaggatttctttgtgcaggcaccaggctaagtgcgtaattatttatttgaatgcaatttatcccttggtatctgtgaaggattggtttcaggattccctgtggatgtcaaaatccatgggtgctcaagtctcttagataaaatggtgtagtatttgcatgtaacctgcacacatcctcctgtatactgtgtactactgtatgttctagagataacctgtgcatttatgaataatttatgaatatatacatgtaaacccccactctcacaaatggcagcatagcatggtcattattctatgtcttctcttatcacttaatatatttgatgccatgtatctgtaggtgtagaactgctttattcttttttcaggactgctttgtattgtgtcaatgtaacatattttttctgtatttatatatggatggatgtttaaattgtttctaatctttttttaattctctttcttctttttttttttcttttgtaacaccaggcattaagaatttgtaatcttttgttatggttttgactagtttttttttttttttttttgagacaggatgtggttctgtcacccaggctggagtgcagtggcacaatcttggctcactgcaacctctgcctcctgagctcaaggcatcctcccacctgagcctccagagtagctgggactgcaggaatacaccaccacaccagaccaatttttgtatttttttgtatatatatatatgtatatatatatatattttttttttttttttttttttttgagacggagtctcgctctgttgcccaggctggagtgcagtggcgcgatcacggctcactgcaagctccgcctcctaggttcatgccattctcctgcctcagcctcctgagtagctgggactgtaggcgcctgccaccatgcccggctaatttctttttgtatttttagtagagacggggtttcaccgtgttagccaggatggtctcgatctcttgacctcatgatccgcctgccttggcctctcaaagtgctgggattataggcgtgagccaccgcgcctggccaaatttttgtattttttgtagagatggggttttgccatgttgcccaggctgggctagaattcctgagctcaagtgatctgcccaccttggcctcccaaaatgctgggattacaggtgtgagccatgcctaggcggttttgactagtttattatggccaaatttgagatcaacctttggaacatatatgtggagacagagacaaaggataacggttgagtggaggaaaggaaggtggagggttggggaaatctagagagagctagaaaaagtaaagggaagagatatttaaggagagaggaataaagaataggagtgaaatagccctggtcttcccaaggctgatactgaaacccaagactcaatttttttttttttttttgagatggtctcactctgtcacctaggctggagtgcagtggtgtgacctcagctcactgcaacctccacctcctggcttcaagtgattctcctgcctcaacctccctagtagctgggattataggcgcccaccaccacacctggctaatttttgtattttcagtagagttgtggtttcaccattttggtcaaagtggtctcaagctcctgatttcaagtgatcctcccgcctgggcctcccaaagctctgggattacagacatgagccactgcacccacccaactcaatctttctatgactgtcttggaaccagactgtttgagtttatagttattagtcatgtgatcttgggcaagttgtcttttctttctgtccctccatgtcctcttaaaaatgggagaaatgggattatacctcatcatctcatcatrtgttgattcatgtagagctgttagtatagtatccacattgagaaagctttctgctcctttccctgtccccaacttggctcttaattcagcctttttcagcccaggtgtattcctccttcaaaccatttaggttgtggtaagggccccacttgtgtatcttacacctttgttagcttttaccccatttctttggaatgctcatatctaattgtttaccccacctgaggatgagaaatcatctcttgtaatgtcttgtataatttaatttctgctatcaccaccactaaaacacttgacataatgcctggtatagagtaggcccttaatcggctgggcgcggtggctcacgcctgtaatcccagcattttgggagaccgaggcgggcagatcacgaggtcaggagatcgagactgtcctggctaacatggtgaaaccccgtctctactaaaaatacaaaaaattaggtgggtgtggtggtgggcgcctgtagtcccagctactcgggaggctgaggcaggagaatggtgtgaacccaggaggcggagagatcgtgccactgcacttcagcctgggcgacagagcaagactctgtctcaaaaaaaaaaaaaaaaaaatagagtaggcccttaatcatgtgtgaattaaactgaagaaagactttggccttagaaacatttagcttggacaagctaactttttaagctttgactctgaggttttttagatctttgggaactgtatcacttaagtgtgtcttaactctctgggtgaaccatagtctatgagtacgaaatgctggggtagagcagagggattctcttgacagaaaagctgatgtggtcctaaatagcactggtagaattgtagcccctcctaaaaaggaatgatgttcagttctagacaccattaaaaaaatttttttttcttattttgaggtaattgtagattcacatgcagttgtaaaaaataatacagaggaatccattatcctttacccataatactccagtggtaacatcttgcataactatggaaagataccacagccacgaaactgacttggctatagttcatatatcttactcacatttcaccagttttacattcacttatttcagtgtgtatttaggtcattcagttttattatatatatagatttgagtgaccaccaccaccgtaaagtcacaatagttccattacaagagtctctcattctggctgggtgtggtggcttacacctgtaatcccagcactttgggaggctgaggtgggtggatcacctgatgtaaggagttcgagaccagcccggccaacatggtgaaaccccatctcttctaaaaatacaaaaaattagctgggcgtggtggcacatgactataatcccagctacttgggaggctgaggcaggagaatcgcttgaacccgggagtcaggggttgcagtcagctgaggtcataccattgcactccaggctgggtgacagagtgagacttcgtctcaaaaaaaaaaaagccaggcacagtggctcatgcctgtaatcccaacactttggaaggctgaggtgggcggatcacgagatcaggagttcaagaccagtttgaccaatgtggtgaaaccccatctctactaaaaatacaaaaattagccaggagtggtggcgcgtgcctgtagtcccagctacttgggaggctgaggcagragaatcgcttgaacccaggaggyggaggttgcagtgagccaagatcgcaccatttgcactccagcctgggtgacagcgagactctgtcccccmaaaaaaaaaaaaamctctcattctacctttttatagccccagtcacctccctcccaccctttctaacctctggcaaccactaatctgttttttatgattttgtcgtttcgagaatgttatataaatgaaatcatctaggagtttggcttttttctttttttagagatacggtcttgccctgttgcccaggctttagcatagtggtacgatcataactcactgcagcctcaaactcttgagctcaagcaatcctctggcctcagcttcccaagtagctgagaattacaggcatgtgccactacacccagctaattttttaaaatttttgtagagacaaggttttgccacagttcccaggctggtcttgaactcctgggctccagtgatcttcctgccttggtctcccaaagtgctgggattacaggcataagccaccatgcctagcctgttttttttttcagtcagcataattctctgaagatccatctaaattgttatgtttatctgtagaaattttcttgcatatcagggccgggtgcagtggctcacacctgtaatcccagcacttcgggaggccgaggcgggcggatcatgaggtcaggagatcaagaccatcctggctaacacggtgagaccccgtctctactaaaaatacaaaaattagccaggtgtggtcgcgggcgcctgtaatctcagctactcaggaggctgaggcaggagaatcgcttgaacctgggaggcggaggttgcagtgagccgagattgcgccattgcactccagcctaggcatcaaagtgagacactgccaaaaaaaaaaaaaggtaattttcttgcatatcaatagtatagttaccacatttagaaaacttaacattggtattgttacctaatatatagtttatattccaattttaccaattatgtatttttttcccacaataatattttttagttgtccttagtggtgccatgacagtgtcttagacttttttttttttttttttttttttttggcagagtcttgctctgtcacccaggctgtagtgtagtggtgcaatctcggctcactgcaacctctgctcactgcaaccctcgcctcccaggttcaagcgagtctcctgcctcagcctcctgagtaactgggattacaggcacgcaccaccatgcccagcttatttttgtatttttagtaggaacagaatttcgctacgttgaccaggctggtgtcaaacgcctgaccttgtgatctgcccatctcggcctcccaagagtactgggattataggtgtgagccaccgcgcccggccgacatttatttatttatttattttttgagacggagtctcgctctgtcgcctaggctggagtgcagtggcacgatctcggctcactgcaagctccgcttcccgggttcatgccattctcctgcctcagcctcccgagtagctgggactacaggcgcctgccaccatgcccagctaattttttttgtgtttttagtagagctggggtttcacggtgttagccaggatggtctcaatctcctgacctcgtgatccatccaccttggcctcccaaagtgctgggattacaggcgtgagccaccatgcccggcccaacatttcttgtttttgatgaccatgacagttctgaggaatactggtcagttgttttgcataatgtctttcaattgagtttttctgatttttttttttttaatgattagactggaattacgggtttttgcgaggaagaccacggaagtaaagtgccatttttctgacatgatatcaaaagtatatactaaaaaatgaattatcgttgttgatgttgtccttgatcagctggctgaggtagtttgttaggtttccctgctataaagttactctttccctctccttttcatattatactttttggaaggaaggcactatgtgcagctcacacttaaagagtggggcgttatagttcctttccttgatgggggtgtatctacacaaagtatttggaattctgtgtgggagatttattctgccctcccatttatttgtttaatcatttacttacatcagtgtagacttgtagatatttattttgtactttggtttataatccaatactttattactttgttgctcaaaatattctagctttggccattgggagctctttcagtttgccctggtccctttcacgatttcctgtcattgtgtgtgtgtgttcgtgtgtgtgtatgtgtgtgtttgaacacttttttagttacattactacaagatattcaaggcttactttgtgtatttcttacctcatcctaggatcagtcatttctccaagggaactggtcccttttattggagaacagtgttagaaactaagagctgaacataatgtgccctctttactactggggtatctgcttctaagctctctcagctgatagaacaaggaaatatatgtgaatactatatacgtatgtctataaatttatccatacttaactatgtctgtgttaagctaaacattagtttatactgatgtttctaactccagtccattctcgcttcctcttcttgtttaactgctgtaaactcctactccaatagtgaaaaatctggcttttaattttctttttttttttttttttttgaggcaaagtctcgctcttgtcccccaggctggagtgcaatggtgcaatcttggcttactgcaacctctgcctcccgggttcaagtgattctcctgcctcagcctcctgagtaggtgggatttcaggcgcctgccaccatgcccagctaatttttgtatttttagtagagacggggtttcaccatgttggccaggctggtcttgaactcctgacctcaggtgatccgcccgcctcggcctcccaaagtgctgggattacaggcgtgagccactgcgcccggcttaattttcttaatcrtatctttcacagaagttgtaagtttttttttgagacagaatctcactctgtctcccaggctggagtgcagtggcgcagtctcggttcactgcagtctccgcctctcgggttcaaacgattctcctgcctcagcttcctgagtagctgggattacaggtgcgcgccaccatgcccggctaatttttttttgcatttttagtagagatggggtttcaccatgttggccaggatgatcttgaactcctgactccagatgatccacccgcctcggctgagattacaggcatgagccaccgtgcccggccagaagttgtaggttttaataaagaccagcttacccaatttttttttcatagatcttgctttttggtgttgtataaaaactcatagccaaactgaagatcaactagattttccctttaaacagcagaaataaatacttttaaatwtataaaatgtattagtatatgttatatagtctaatatattcacatataaaacttatattttatattcatatataaaacattatgtatagtgtgtgtgtatatatatatagagagagagagagagaaaaggagagagagagagagggcctagattttctcctaatttttttttgttttgagacagagtcttgcttgttgtacatgctagagtgcagtggcatgttctcatcttactgttacctctgcctcccaggctcaagtgacccccaccccacctcagcctcttgagtagctgggactacaggtgtgcattcccacacctggctctgtatttttctttgtagagacacactactttgtagagactacaaagttgttcaacaactttatagagttgtagaacaactcaccttgttgcccaggctggtcttgaactcctgggctcaaatgatcttcctgccttggcctcccaaagtgctgaggttacaggtgtatgccactgcacccggccttctaaatgttttataggtttacatattacatgagaggttgttttttgcacttcttttaactgagattttgactgttgtcaataagtaatatatttyccccctttaatttcttggatgggacatggggttccgtcagaagttttatagttagaaaaagaaatggtaaaatgaaattttggaacttgctgagcagtggataaaaagctctgttaattttggaattcaaataccatatgtcatagggagaaaataaatgtatcttttcctagccctcaatctgattgagggaacatgacatatataataaaaataatcagcactaaaggcaacatgtggtgtagtgcttaattgtgtttttwaaaaaaaccctcgagtttatgaggagatcaaggtcagtgtgagctggactagtaagagaaggcatcttggaagccagaccttttttttttttttgagacaggatcttgctgtcttccccaggctggagtgcgatgacatgatcatagctcactgcagcctcaacctcccgagctcaaaagcgatccttccaccatagcatctcaaatagctgggactataagtgccaccaccatgtmtggttaatttttaaaatttttagtgtagatgagatcttgtcatgttgcccaggttggtcttgaactactggactcaagtgatcctcccaccttggccttccaaaatgctgggattataggtttgagctactgttcccaccacacctggacttttctttctttttatagctgcacaacattccgttatgtggatgtaccatagtgcatctaaccagtcctctgttgacaaactttaagaaagtttatagtgtattggcattacaagcagtgctgtaatggataaataaggttcattttattattatttattttatttttttgagacagtttcactctgttgcccatgctggagtgcagtggcacaatctcggctcactgcaacctccacctcccatgttcaagtgattcttctgcctcagcctcctgagtagctgggattacaggygygtgccaccacacctggctaatttttctatattttgtagagacggggtttcaccacgttgcccaggctggtctcgaactcctgagttcaagcaattctcctgcctgggcctcccaaagtgctagggttataggcatgagccactgcacctggcctggataaataagatttagatttgactttgaaacatttggttcatatcctgtattatcccaagatacagattgtgaccagaaacaatgaaggcaaattgacatattttctgtaataagtggctcatatttataacagtagttaacacatccatatgtatgcatataatttatgtatttgagggcactactgcaaaaagttataggagctgtggaatgcktgygcatattataaagtttaaaaatacaagttkattatggagagtaagcctcttatcccctgcctagaatctgcaatattccagtttcttgtattttaagggtggtattcttcaacgtccagctgtgtacagtatcaccattggcaagttgacttatttcccagggtgattcccatccaagaaatctctattttctcactatcctcctaatacaagcttattttgctgctggccattccagctatttacattctgttggtctcttttcaagtctaatttttctagagcagtcctgaataagcaggcctcaatttctttgaggttcagagcttcctctcttcagttctagcattgtccatacaactatgtcactcttggaaatccctgttctgctgagcatgtttagttatcatgtgggtgaataatataacagtgatctttttttttttgagatggagtctcactgtgtctcccaggctggaatgcggtggtgggatctcagctcactacaacctctgcctcctggttcaagcaattctcctgcctcagcctacagagtagctgggactacaagcgtgcatcaccacacctggctaatttttgtatttttagttgagacgaggttttgccatgttggccaggctggtctcgaacttttgacctcaagtgatctgcctcccttggcctcccaaagtgctgggttacaggtgtgagctacctcacccggccgatttctcttagagtctgagaaaatcactgaagatttaataaataaaccactgatatgtgtataattatattagcacagctttctcaatcttgtagaaactattgctctgctgatctaattaaggaagttctgattctttttgtaaggggaagaatcctttaaaaatgggaagatggggccgggcgcggtggctcatgcctgtaatcccagcactttgggaggccaaggtgggaggatcacgaagtcaggagattgagaccatcctgaccaacgtggtgaaaccccatctctactaaaaatacaaaaattagcccggcatggtggggcatgcctgtaatcccagctactcaggaagctgaggcaggagaatcgcttggaccggggatggggaggtttcagtgagccgagattgcgccactgcactccagcctggtgacagagcgagactctctcaaaaaacaaaacaaagcaaaacaacaacaacaaaagagaagatgtacatcctaaatctgtttttgtttttgtgttttttgagacggagtctcgctctgtggcccaggctggagtgctgtggcgcaatcttggctcactgcaagctccgcctcccaggttcatgccattctcctgcctcatcttcctgagtagctgggactacaggcgcgtgccaccacgcctggctaatttttttgtatttttattggagacgggggtttcaccgtgttagccaggatggtctcaatctcctgacctcgtgatctgccgacctcggcctcccaaagtgcttggattacagtcgtgagccaccgtgcccgacccctaattctgtttttaataaatactgattttgttgttgttgttgttgtttgtttttgagatggagtctcgctctgtcacccaggctggagtgcagtgtcacgatctcggctctctgcaacctccgcctcccgggttcaaggaattctcctgcctcagcctcctgagtagctgagattacgggcatgcgccaccatgcccggctaatttttttattttaagcagagacggttttgtcacgttggccaggctggtctcgaactcctgacctcaggtgatccgcctgcctctgcctcccaaagtgttgggtttacaggcgtgagccaccacacctggccaaatactgagggttttttttctttttttgagatggagtctcgctgtgtcacccaggctggagtgcagtggcacgatctcagctcactgcaagctccgcctcccgggttcatgccattctcctgcctcagcyttccgagtagctgggactacaggcacccaccaccacgcccagctaatttttttgtatttttagtagagacggggtttcaccatgttagccaggatggtcttgatctcctgacctcgtgatccryccaccttggcctcccaaagtgctgggattacaggtgtgagccaccgttcccggccatactgagttttctaaaggctgcttacagtatactttggaaagaaattgtaaaattaagaattcttaagcaattgcgtcttgcatttagtgattcagatttacattttagcttattttacagcgattttgttcttaagagttgataaggatatcaaatcagaatgaaaacatcattgtgtcctcttaatttaaaagccatagtttccaagctttttgctcttttgttttttttgagacaaggtctctgttattcaggctgagtgcagtggcatgatcatggctcactgcagcctcaaccttcttgggcacaagcgatgcttccacctcagcctcctgagttgctgggactacaggcttgtaccaccttgcctggctgatttgtaattttttcggagagaggggctcttgctctgttgcccaggctggtcttgaactcctgggctcaagccatcctcttgccttggcctcccaaagtgctaggattatagatatgaactaccatgcctggcctgtttttttctgaaatattcatgtattttttctctataagaggccaagtgatttgtgaggttacttcttctttttttaaaaaattttttgtagagatggattcttgctatgttgtcctgggctcaagcaatccttctgcctcagcctcccagagtgctgggattataagtgtgagccactgcacctggcctgtcagtcaggttgcttctatacctattttcttatctagaatatgtggtaacagtattaacctgtttgtaaattatctaacaataattgaatgctttatgtattgatgtgggcctccagtgaattgattctggtcaaaattcacatctttggaatgtcaaattcattctgctgagaggctggaactttcctagatagacaagccacagagactttctgaaaatcaaggtagagagcctaagcattttrgagcttcatgttgtgtttgagaatggaggcccagagaaggaggccatcagctccagtgacttccctagtgccttcatggtaaaactcagcatagaattttccctccacacctgagcctcttccaagagcttctttcatgtcttggcttgtgtgacaccttgccccagcctcatcccaggacttttctgcaaaaggaattcttttcccttggcccacgtgctgctgcatatatccaattaatgaacaatctagatatatttgttaagcatcaaggtactggccacgtgtaataataagcaagagaggcaaatgtgtgtcctgtgttcagtaatgctatcatgttggtgtttacttggtttgggaggatagaggtcattcatagaaatggaaagaggtattgatttagaaactaatgcaaataaagacaggaaaatatgttttctcatattctaatttgacaaaatttaaaatatacataagtttcataaggtgagaatacttatttatgttctttcttagtcatccagtctctggaactctccctgccttgacaccacctcccttcccaacctttttaaaaacagtggtttaattgtctgcttgcagaggtggatactttttattctggtggaagactggagcagtgggtgtttgtttacagtttaagatgccctttagaatctgctttccttgttccctcaggtctgaactttctgaaaagttctgatctaatgtggtcataccaggtttgactatatcttttattctacttcttgcattgctgtcaatttatcataagatttttcttttgtacatttcttttagctaaagagttggccatgggaaactccgctttattcacatacacctttatattaatgtattagagtgtgtgaatattttmctatatccatcatttattcatggaacatttttgagaggatatgtattgtgtgctgtatgaggcactgggggtgcaaagttgaagaagattcatggctcatggttttagttttaagaaacctcaagagagactggcaaatgaacagataattctgatatgttggggtaaatacaaatgatagatagagatcctatctagggtattgtggaccacagaatagagcaggattggtactcaaaatacagtatggggaccctgagaggtccctgagctctggaaggtcaaaacttttttttaaagtaacaatactatttgcccttttttctctctttttttttttcccctcacaaattaacaatggagttttccacaggcaagggaacttgtaatatctcaatagagatgagaatccctccctcttgccctctttccctcctttcctccgccactctttcctttcccctttctactttcccccttcccttttctttctttctttctttcttttttttttgagatggagtctctgtcacacaggctggagtgcaatggcgcgatctcggctcactgcaacctccacctcctgggttcaagcagttcttctgcctcagcctcccgagtaactgggattataggcgcccaccaccatgcctggattttttttttttttgtatttttagtagagacggggtttcactgtgttggccaggctggtcttgaactcctgacctcgagtgatccacctgcctcgacctcccaaagttctgagattataggtgtgagccactgtgcctggctccccttttctttccttctttctttttcttcttttttgtttttgtttttagaaacaggatcttgctgcttcgcccaggctggagttcagtggcaccatcatagttcactgcagccttgaactatgctcaggtgacccatctgcctcagcctcccaagtggctaggattacatgtgtgcaccaacacacccagctaatttttttctttatctttttttttttttttttttttgagatggagtcttgctctgtcaccagtctggagtgcagtggcccaatctctgctcactgcaacctctgcctcccgggttcaagcaattctcctgcctcagcctccctggtagctaggactacaagcacgcgccaccatgcccagctaatttttgtatttttagtagagacaggatttcaccatgttggccaggatgatctcttgacctcctgatccacctgcctcggcctcccaaagtgctgggattacaggtgtgagctaccgcgcctggctaattttttatttttatttttttttagagacgagatctgctacattgtccaggctgtcctctaactcctgagctcaagcagtcctccttccttagtgtctcaaagctttaggattacaggcatgagccactgcacctgccctgtgactgttttcaactataaacatacctattctgtcattcttacaactttgaatataggtaattttatccatttaatgcattgataatggcggtggcatgatccagaagcacacaatgaacataaaatggggaggctctgatatttgatacaaattgctatggtacaactgctcattcctgtgtagattatcgttatttaaaaaataatactcttgctatatcacctcatttcattataatgggtacctgttctacttgcttttttgacttgtcatctcatttttactgtgcctagagaattttgttagaagtcttacccctaattacctgtttgagaataggtaaacttttatcgaacttactgtaataagtaggctacatcctacataatgaattgagtaagaagaaagaggacatgggggtttttaaaaaatgtttcctgaatctattcttttttagtgtgaaatttatatgtatgtgattttgaaataattcagaattaatagaaaagttaaaaaataggccgggcacggtggctcacgcctataatcccagtactttgggatgcctaggtgggtagattacctgaggtcaggaggtccgagaccagcctggccaacatggcraaaacccatctctactaaaactataaaaattagctgggcgtggtggcacacacctgtaatcccaggtactcaggagactgaggcagtagaatcacttgaacctggaagatagaggttgcagtgagccaagatcacaccactgcactccagcatgggtgacagagtgagactccgtctcaaaaataataataataatagagttgtagctgggtgcagtggctcaagcctgtaatgccagcactttcagagcctgaggtgggaggattgcttgagccctggagtttgagaccagcctggaccacatagtagaccccatccctacaaaaaaaaaaaagtcgggtgtggtggcacacgcctgtagtcccagctactcaagaggctgaagtgggaggatccctagcccaggaggtcaaggctgcagtgagccatgattgcaccactgcaatctttgggtgacaaagactctgtttaaaaaaaaaaaaaagtgtcatgggttaaaagttatcctcaagactgttctattctccagtagaagaaacatttatattaataaatgagaattgtgagtattaataaatgttataaagatgataaagtaatgtggtagataatgacctaggttgctatcttaactgtgagactgtgtagaatgcctcttagaagaggtaacttggagttaaaacgtaaatgttatgaagtggcagaagacctggaggcagcacattgcaagctgaaagaacagcatgtacaagagccctaaataggaacaaagtgtgaggaagagaaaatataccagtaaggctagagagtagttgaatgaagaggaaagcagatgaggtcagagcctggcatggtggcttatgcctgtaatcccagcacttttagaggctgaagtgggtggatctcttgagcacaggagttcgagaccagcctgggcaacatggcaaaaccctgtctctgcaaaaaataacaaaaattaggcaggcgtggtggcacacacctgaggtctcagctactagggaggctgaggtgggaggatccctagagcctaggaggttgaggctgcagtgaaccgtgatcatgctgctgcacaacaggctgggtgacagagcaagaacctgtctcaaaaacagacaaacaaaaaaacaagaaaagaaaaaagatgaggttagttgtagacagataccagatcatatagggtaggtcatttttaatatcatgtagggtcttagtagttcatagttgtaacgcaggtagggttaacagcaggaagcctttggaaggttttaagcagatcactccagtgatatgatttatgctgtacaaggtacattctggttgatctggtgcggattaattgtagagaggtaagatttgactttgggaagctgaggcgagcagatcacaaggtcaggagttcaagaccagcctggccaatatggtgaaaccccatctctactaaatatacaaaaaaaaatagccagatgtggtagcaggcacctgtaatcccagcctcttgggaggctgaggcaggagaattgcttgaaccggggaggtggaggttgtagtgagtcaagatcatgccactgcactccagcctgggcgacagagtgagactctgtctcaaaaaaaaaaaaaaaaaaagtaagatttgaagcagagagacagatttggagggtgttggaacagcatagcctcagcctcccgagtagctgggattataggcatacaccaccacgcccggctaatttttgtatttttagtagagattgggtttcgccatgttgcccagtctggtcttgaacttatgggctcaagtgatcctctggcctcccaagtaactggattacaggcttacatctctgtgcctggcttggtgaggcttttgttcagaagagacatgagactttgtatagctaggggagaaaaagttgacccggaccccgagagaagcaacatggaattatggagaaaatatccttttccaaggggactagtgttagagatcttgggttgatgacttcagtgaggtgggcagtgctaaggtcttagttccagagatggtaaaagaataggtcctgttattgtgtgtttgtgttgatagtatttaggccctattttggttcattcatttactaatctatatgtattgtagtaatggattatcctggagttagaaatacttttaaatacaaaaacaagtggaaagtctttcccacctatatccctcagctaccttgtttctattcacaccattcctccaatgctccaccccaccyaggaaactattgttcaatttctcatgtaamcttctagagtttctttatataaataaagacaataaaaatacagattcctggccaggcacagtggctcacgcctgtaatcccagcactttgggaggctgacgtgggtggatcacgaggtcaggagttcgagaccagcctgaccaacatggtgaaaccccatctctactaaaaatacaaaaattagccgggcgtggtggtgcacgtctctagtcccagctacctgggaggctgaggtggaggatcacccgaggccggggagttctagggtgcagtgagctgctattgtgccaccacactccagcctgggcaacagagtaagactgtctcaaaaacaaaaagaaaaaaaagataaataaataaataactgcagattcttgtttctttctatctttaccctaaaatccaccaatctcaaaggtagcatattataactgttattttgcaaattggtcttcccaccttcccccttgcacagtgtgtttttcacttaagaatagagatttacacagaaaatctttccatagagtatataggatttttttcctttttctttttttttgagacagggtctatttctgttgcccagcctggagtgcagtggtgtgatcttggttcactgcagcctgagcctcctggattcaagtgatctttccaccttggcctctgagtaactggatcacaggcacatgtctccactcctggccctggattttatttttaggagtagttttaggttcacagcaaaattgagcaggagtacagagagttttcacatacacccattaccctacacagtcataactgtacccacacatgcatagcttcccccactatcaacatcctgaataaacaagtttgttatttttgagttcaccaattttcttacttttggaaaaacaatcagctttatgtacttcgaaattgttctgaaatttgttttataatgttcctctcatttaaaaaattcatcttcatcaaaagacaccttaaagaaagtgaaaacatgccacatgttttgggaaaaataattgtaatatatgtaatagggaattagggtcgtgaccagggctggcttcatgggtgtgcaatctgtgcagtcacgcaggacccctcatttagatggtccccgtgcttagtttactggtaagctgtcaccgtcttgaaattcttaatttttgaaaaagtagcccaacatttttatttacttattttaaaatgtttttatggtgaaaaatttatatttggaatttgccagctgagctcagttttggttattccagttttgttggcaacattcaaagcatcatagtcaggaatctgttgaatatatgccttctctctggcagactcaatccgggtgttgaccttggccatgtcagtgtcctagagcttcttcacagcttgtttcatctggcgcttgttggctttgacatacacaactaatgcaagtgtggtgtggtcttccgtcttctcattggtcaggattaagcgtgtttttcttgggagtgctcttcctagtatattttggctgcagtgtcttggggcagcctgaaggtgggtagcatgcggatatctttcagcagtgtgtttttggcctttaaagcctttgttggcttcagctttgggagaggcaggggcttcctttttctctttggtgccatcttggtgaaaaggcctcactttttattttgcactgtgctctgcaaattatgttgtctgtcctggtcctgaatatataaagcctactaattaattagaaaaagccaatccaataagaaaatggccaaaatctgagagcaaagatcttcagcctcattagatcttcaacctacatattttaaaatgtgtagcattaagaagtgattacatatataagtaataaaatttacgtgacttaatttagctcatttagattaatacttttgtcttcaaccttttttgtagtgtatgttttaactggaaaaagtcttccatgaaaacgtcacttttaaaaaataagtaatgccatctgttttcctaaaagactgaaatgggggcgaccattcttaggtaagtatccaattttgtatttttaattacttatatattggttagagtataaatctttttttttttttttttttttttgaggtggagtcttgctgtgttgcccaggctggagtgcagtggtgcamtctcggctcactgcaacctctgcctcctgggttcaagcaattctcctgcctcagcctcctgagtagctgggattacaggcacatgccacaatgcccrgctaatatttttgtatttttagtagagacggggtttcaccatgttggccaggctggtgttgaactcctgacctcaagtgatctgcccgtcttggcctcccaaagtgctgggattacaggcatgagccactgctcccagcagattatgaatcttttagttaacctatgaggtagggagggagtgggagtaggggggatgctaggtcttgtttgaagatagtctgttattgaggattatgtttcctacagagttaagaacagaacttcatgaagcagagaggagtgtcagtagtgttgaaagctctttagacaggttagttgaaaactgaagaaacttttttggatttgacagttaggaattcattgatgatcccagcaggggccattttaggagactgtttatggctgaaaatcaggttgcartggagtgaagagtaaagaggaggtgataaaatctaaatatttcagctatttcatttattaaacccatatgtaatatagctgcagtcatcacttccttaagcactggagttatagttagggtaaccatatatcctggttcaaatctcctatagatcaattaatgcccaattatttttatttttgtttttttgaaacggagtcttgctctgtcacaggctggagtacagtggcaccatcttggctaactgcaacctctgcctcccattttcaagctattcccctgcctcagcctctcaagtagctgggactacaggcgtgtgccacctcgcccagctaatttttgtatttttaatagagatggggtttcaccatgttgaccaggctggtctcgaactgctgacctcaggtgatctgcccgcctcaacctcccaaagtgctgggtgggattataggcatgggtcaccatgctgggccttttttttttttttttttttaaaagacagagtctcatgctctgtcacccaggctggagtgctgtggtgtgatctcggctcactgcaacgtccgcctcccggtttcaagtgattctcctgcctcagtctcccaagtagctgggattacaggcacccaccactatggtcggctaatttttgtatttttagtagagacggggttttaccatgttagccaggctagtctcgaactcctgacctcaggtgatctgcctgcctcggcctcccaaagtgctgggattacaggcgtgagccaccgcgcccggctgagataatttttttttaagaaaatggggtctcagtctgtcactcaggctggagtccagtgatgctatcacttctgggctcaagtgatcctcctgcctcagcctcttgatgggattacaggtgtaagccaccaggctcacccagcaagaggtgatttaaagtatacaagaagatatgcataggttgtatgcaaagaccatacaatttaatatcaggaacttgagcatttctggattttggtgtctgcaagggttctggaaacaattccccccagataccacagatgactatatatttattgtttatcttctctgtcctcattagcatatcaactccatgagaaatggacctctgtttttgttcactgttgtaaccctagcagctagcagagttcttggtatattagtaaatgctcggtaaatatgtattcagtatataatggcctccagtgccttgatgcatcccctttatcaatcctgcatctcatagacagttatttcaattaccagtgtcaaatttctcatgttcacctaaaaggttatgctagctaaattcatactgcctgccatgtcatgctagcttatctcaaactaggcctttactattgctcagcaatcatattaaatttctccaccgtctctggtctggttagttgcaacagcctcttaactgacttttgtgcttccactctgcacctgtaattcatcttcaataaaacagaggactctaaggcatatatcatgtcataccacttttatgcttaaaaactcacaagatgctgggtgctgtgactcacgcctgtaaccccagcactttgggaggccaaggcaggtggatcacctgaggtctggagttggagaccagctggccaacatgatgaaacttgatctctactaataatacaaaaaattagctgggcatggtggcgggcacctgtaatcccagctacttgagaggctgaggcagaagaatctcttgaacmtggagggtggaggttgcagtaagctgagatcgcggcattgcattccagcctgggcaacaagagcgaaactccatctcaaaacaaaacaaaacaaaaaacaaacaaaaagaactcacaagactttgagtctaaactccttaccacagccacagaacactacgtggcctggctctgcctacttcttcaatctgaaatttttttaagagatggtgcctcactatgttgctcaggctgttttcaaactcctagccttaagcgatcctcctgccttggcctcccaaagtgctgggattacagatgggagccacagtgcctggtcaacttctttaatctcatctcatgacactatggtcctcatccaccttattgtagaaacactggaattctttccattcctcaaacaatcagctcatttccaccttgaggtttaaacttttttttttttttttgagccagagtctcgctgcaacgcccaggctggagtgcaatggtgtgatcttggctcattgcaacctctgcctcccagattcaagcgattctcctgcctcagcttcccgagtagctgcaattataggcatgtgccgtcatgctcgactgatttttgtatttttattagagacggggtttcaccatgttgacggggctggtctcaaactcctcacctcgcgggatccgcccccctcggcctcccaaagtgctaggattacaggcgtgagccaccatgcccagcgaggtttaaacttacatagcttgattttcttttagtttggttaaattcttgtctttcagatcttaatgtcacctcctcagaagaagataaccagtcactatcaactgccatattttaattcttttcatatcacattacaatttggtattgttcttgttcactccagtgattagctccacgagaacactaatcttgtctacaagagtgcctggcacaatgcaggtggtcagtaaatatttggtgaatttggtagctgccctatgtttttcctaaatgctttcttctcccaggatcccaacctcaccactaattaactatatgccgaatagataacctcaatccctacattattaaaaaaagtaagataagaaatcctacacttagctgggtgtggtggcacacacgtgtaatattggctactgaggaagctgaggcaggaagatttcatgagcccaggaattcaaggttgcagtgagctgtaattggaccactgcactccagtctgggcaacagagtatgaccctgttggaggggagggggagagaaagagaaggagaaaagaaatcctacagcttcttcctctttgcctaaaaattccttgatatatcctctcttccagtcctctagtttctaagcagaaagattgctactcttctaagagctaaaccctttacctatgtctttgatctcaatcaaacttcttacctcttctgagtaaaaacttaattactctttttaatatttaaactgtatgcaagctgagtacagtggcccacacttgtaattagccaggcatggtggcgaatgcctgcagttccgcctacttgggaggctgaagtggaaggattgcttgagcccaggaggtcgaggctgcagtgagcccagatcctaccactgcacttcagccgggcaacagagcgagactgtgtctcaaaaaacaaaaattatctcaatggtaacctggaaaatgaaaaaaaattataatacctaatacaatgtaaatgccttgtgaataggtgttattgtattatttagggaataatgacaatagaaaaaagtctgtacatgtttagtacaggcacaacagaaccattacccgatccaatatttcttttttttctttaattttttgaaatggagtgtcactttgttgcccaggctggagtgcaatggcgcgatctcagctcactgcaacttccacttccctggttcaagcgattctcctgcctcagccttcagagtagctggaattacaggcatgcaccaccaggcctggccccgcatccaatattttcgattcatagttggttgtattcatggatgtggaacccaccgatatagaacacacagatatggagggcctactatataatatgttgggtggtgataagtgttattttgaagatttataccttgtttgccattgtcattaaggtatggaaatatattagggaaaagtagacattgatgaaggagggatatgtttactaaggtaaagttagggaagacctctctgattaggtgacatttgagttggcagctccaaatgaagtgagggagcaggccctctgggtattttggatagggtggggagggcattttagactgaaggaacttaaatacaaagtgtttgaagctggatgtgcttgatgtgttctatgagctgcaagagggccggagtggctgcattgaagtaagtgagggtggaggtagtaggagctgacatcatcattgtgaatgtggtagaggcttgagtcaagttgtagaccagagtcaggccttttyctctgtatgatggtggagctgcagatccaggagtgaggttgtggtgggaagtgaaaggtcaagctgtggctgagaggtgtaacttcaggctgaagaattgtgaggccgccaggtgcagtggctcacgcctgtaatcccaacagttggggaggctgagacgggcagatcccttgagttagagaccagtctgggcaacatggtaaaaccccatcactacaaaaaatgtaaaaatcagtcgggcgtggtggcgcatgcctgtagtcccagctactcgagagactgaggctagaggattgcttgagcctgagaggtggaggttgcagtgagccgagattgcaccactgcactccagcctgggtgacacagcaagacatctcaaaaaaaaaacaaccatgaggtcagatgtttgaagtatctgaaagtgaagatgagagaagagggtgtacaataaaacagatttttgaacaccacagggaggtaggaagcgttgaaaaaggtgagttggaggcacagagggcctgtaagttcataatggacaagtttatttggcttcaggttttttgttttgttttgtttttgaggtggaatctcactctgttgcccaggctggagtgcagtggtgtgatctcggcttgctgcaacctccacctcccaggttcaagtgattctcctgcctcagcctcctgagtagctgggactcagggttttttcttttttttttttttttgagaaggagtctcactccgtcacctaggctggagtacagtggcacgatcttggctcactgcaagctctgcctcctgggctcacgccattctcctgcctcagcctcccgagtagctgggactacaggcacccgccaccacgcccagttaattttttttttttttttgtatttttagtagagatggggtttcactgtgttagccaggatggtctcaatctcctgacctcatgatctgcccgcttcggcctcccaaaatgctgggcttccaggcatgagccaccgtgcccggtctcagggtttaaaaaaaaaaattggtgaaatacacacaatataaaatttatcattttgcttttttttttttttaatgaggacagggttttgccctgtttctcaggctggcctcgaactcctgagctgaagtgatctgcccaccttggcctcacaaaatgctaggattataggtgtgagccactgcatctgggggaaatttaaccacttttaagtgtataattcagtggcattaagtacattcacaaaagtacatcatcactgtccatctccagaactttttcatcatccctaaccgaaactccatacctattaaataataacttctcattgccccctcttctttagtccctgagaaaccactgttctattttctgtctctatgaatttgactactctgcttcagatgccttgtataattggaatcatacaatatttgtctttttgtttctgacttattacacttggcattatatttttaaggttcattcattttgtagcatatagtagaatttcattccttttaaaggctgaataggctgggcctggtggctcacgcctgtaatcctagcactttgggaggccaggacgggcrgatcacgaggtcaggagttcgagaccagcctggccaacatggtgaaaccccgtctctactaaaaatatgaaaattagctgggtgtggtggcccgcatctgcagtyccacctactcgggaggctgagtcaggataatcacccctgagtccaggaggtggagcttgtgccgagatcacaccactaaactccagcctggcgacagagagagactccgtctccaaaaaaaaaaaaaggctgaataatattccattgtatgtacacaccacatttccacattttttttgtctatgtrtctgttgatggtgacactggtgctgtttctaccttctggctgttgtgaccagtgctgctgtgagcactggtgtacaaatctgagtaaatccctgctttcatttcttttgcatacatcaccagaagtgggattattagatcatagtggatcatatgctttaatttttctttttattttttttgagatagggtctcactctgtcaaccaggctagagtacagtggtgtagtcatggctcactgcaacctccacctcctgtgctcaagtgatcctcccacctcagcctcctgagtagctgggactacaggtgcccaccaccacacctggctaattttttgtatttttattagagacagtgtttcgccacgttgcccaggctagtcttgaacacctggctcaagctgtctgcctgccttggcctccaaaggaccagaaacagtaggcactcaacaatatcatgctgggattacaggcgtgagccatcacgccctgccatatgctttaattttttgaggaacaatcctgctgtcttccatactggctataccattttttatttgcaccagcaatacacaagatttccagtttctccacagccttgcctgggtttggttttataaaaaaaaaactctgtggtgttgttttttgttttttkttttttttttttttttgagacgaagtctctctcttttcccccagtctggagtgcaatggcacgatctgggctcactgcaacctccgcctcccgggttcaagcgattctcctgcctcagcctccctagtagctgggattacaggtgcgtaccactatgcccagctaattttttgtattttaagtagatacggggtttcaccatgttggccaggctggtctcaaactcctgacctcaggtgatccgcccgccttggcctcccaaagtgctgggattacaggggtgagccaccgcccctggcctttttttttttttttttttttttttgagacaaagtcttgctctgtcacccaggcttgagtgcagtggcatgatctcggctcactgcaacctcagtctcccaggtttaagcgattctcctgcctcagcttcccaagtagctgggattacaggcgcatgccaccaggcctggctaatttttgtatttttagtagagacagggttttgccatgttggtcaggctggtcttcaactcctgacctcaggtgatctgcccgcctcggtcttccaaagtgctgggattacaggcgtgagccactgtgcccagccagtagtatagttgtggtttttgaataatggaatgttttaagtttatttccttaaaagaatgtttatcatacactgttttctggtagttttagaagtagcacaaatccttatgctctgctacaaggtcagaactggtaaagaaaggtgtcttcatccaggcgtggtggctcatgcctgcaatcccagtactttgggaggccaaggcgggcagaccacctgaggtcaggagttagagaccggcctggccaacatggcaaaaccccatctccaccaaaaatacaaaaactagccaggtgtggtggtgcatgcctgtagagccagctacttgggaggctgaggcaggagaatcgtttgaacctgggaggcggaagttgtactgaaccgaggtcataccactatactccagcctgggtgacagagcaagatcatgtctcaaaaaaaaaaaaaaaaaagtcttctagttaaattttagtgagagattttcacaggaattaaaattctggggccttaaaaaatcttaagtatgctttgccataagcttcagggaccgtgtccatgttacttggctgtgtgtagtcatgaatatgatcttttaggataggacagcaattaaacaaactagatttttttttctttctttaaaaaaaaaaaaaagaatacatttgttaacctcctgtttggaaattttacaaggagctggagaaattttcacttttgtgtttactgattgattgtgtactaccttaactgttggaaaaatatattccctattcagatgaatgataaaccagtaaaagctatgaaagggaaaaaatgtgatgggattacagctgccacagagaggtttttgaagctttgcaccttgtttgcaattgtcattaagataatggaaattttgaaagatgatcttaatgtcttcaatattgttataattaggcttttttctttgtaaatgatgtgtcttaatttgaaaagttttcctttaggagcttctttttttttttttttttgagcggagtcttgctctgtcgcccaggctggagtgcggtggtgcgatctcggctcactggagcatctgcctcctaggttcaagcaattctcctgcctcagcctcctgagtagctggaattacaggcacctgccaccacgcccagctataggagcttcttatgttatgtgaacactatgagtaaacagagtggtatagtttaaacttgccttccagtttttccaagttcctctttctccaattcattgtctttgcctcggggttctttttcattaatatgtatggatgtttacgcagttagaaaaaatgttcataaagatgatattgttgagtgcttactgtttctggtcctttgataatgtggtgtgctttttacttttacacagaaaataactgtggtcagattgtcatgcagtttgccatagacagtaaggatattgtgaaagaaattctggctgtctgcatagcatgacctttcaaaactgttttctttgctgcaagcatttcacttagccttttgactgccacatgatagaggaagtagtacataaagggtaatataaatggctgccttgttggtctcaatactgttttttaaaccatgttaaatagtcacatgttattaaatagttttatgtggaggattaccagttttatgcatagtatagtacattttaagtataattttataaaacttatagtatttaaaatttaaatacaggctgggcacggtggctcatgcctgtaatcccagcactttgggaggccgaggtgggtggatgacctgaggtgaggagttcgagaccagcctggccaacatggtgaaaccccatctctactaaaaatccaaaaaattagctgggcatggtagtgcgtgcctgtaatcccagctactcaggaggctgaggcttgaacctgggaggcagagattgcagcgagccaagatcgcgtcattatactccagcctgggtgacaagaacaagactccatcttaaaaaaaaaattaaatagaaaatcacattattttcaaaaaggacctaaactttttattcaaagttttaaggattattagtgaatggagattattatatatagctcatgactacaaatctgtaatttttgtgaggagacatttttaaagcaacctttggagctctctttctgctgcttctgagcacccaggagagactgttttctttaacactgtgaagagaactggggaaaatgaggaagctccagcctgattttattttacttttattttattttatttgagatggagtcttgcttcatatactccagtaaatgtggtcatgctatatatattcttttgtttcttttaacattgttggtaaggttcattaatggtgatgtgtgtagctgtattttattcatttttcctattgtaaactattatttattgatctattaatgtacattaggattatgcctagttttttgttactatgaaaactttcaccttaaacattcatgtgaatgtcatatcctcagataagcattttcttttttttttttttttaagtatttattgatcattcttgggtgtttctcggagcgggggatttggcagggtcataggacaatagtggagggaaggtcagcagataaacatgtgaacaagggtctctggttttcctaggcagagggccctgcctgcttccttccgcagcgtttgcgtccctgggtacttgagattagggagtggtgatgactcttaaggagcatgctgccttcaagcatctgtttaacaaagcacatcttacaccgtccttaatccatttaaccctgagtggacacagcacatgtttcagagagcatggggttgggggtaaggttatagattaacagcatcccaaggcagaagaatttttcttagtacagaacaaaatggagtctcctatgtctacttctttctacagagacacagtaacaatctgatctctttcttttccccacatttcccccttttctattcgacaaaactgccatcgtcatcatggcccgttctcaatgagctgttgggtacacctcccagacagggcggcggcctggcagaggcgcccccccacctcctggagggggcggctgccgggcgggagcttccccccgcctccctccgggacagggcggctggccgggcgggggctgccccccacctccctcccggacggggcggctgaccgggcgggggctgccccccatctccctcccggacggggcggctggccgagcgggggctgccccccacctcccggacagggcggctgctgggcagagatgctcttcacttcccagacggggcggctgcggggcggaggggctcctcacttcccagacggggcggctgccgggtggaggggctcctcacttctcagacggggtggccgggcagagacgctcctcacctcccagacggggtggcggccgggcagaggggctcctcacatcccagaccatgggtggccagggagacgctcctcacttcccagacggggtggcggccgggcagaggctgcaatctcagcactttgggaggccaaggcaggcggctgggaggtggaggttatagcgagctgagatcacgccactgcattccagcctgggcaagattgagcactgagtgagcgagactccgtctgcaatcccagcacctcgggaggcccatgcgggcagatcactcgcggtcaggagctggagaccagcccagccaacagggcgaaaccccgtctccaccaaaaaatacaaaaaccagtcaggcgtggcggcgcgcgcctgcaatcccaggcactcctcaggctgaggcaggagaatcaggcagggaggttgcagtgagccgagatggtggtagtacagtccagcctccgctcggcatcagagggagaccgtgcmaagtgggagacggagacggagacgagagggagagggggagggggagggagagggagagcctttttttgttttttgatacagagtctctctctgttgcccaggctggagtgcagtggcgtgatcttagctcattgcaacctctgcttcccgggttcaagtgattccactcagcttcccaagtagctggaattacaggtgcatgccactgcacccagctaatttttgcagttttagtagagatggggtttcaccatgttggtcaggctggtctcaaactcctgacctcaggtgatccacttgtcttccaaagtgttgggattacaggcgtgagccactgtgcctggcccggataagcattttcgtagaatattatacctagtaatgcaatttttgatgctaaactccctttggaagaggttaaatcagtttattctcccataagcaacgatctatgaaatggcatctcagtgtggttttaatttacattttcttggtgaccaatgaggttgaacattttcccccatatgtttatgggttatttgggcttttgggaaactaattattatcccaattttttttgttggattcatgttctttatatgttctttttcacactgtaactttcaaaagttgtttattttatcattttttatttatctgtttgacattcttcattgaatctcttgttcttttgcatgaagaacagcaccttaatttgacctaccagcctccccagtaccattctgcccctgtactctgcttgttgaattccataaatgcttaaggtttctcaggtctttgcatatagtctttctttccttgcctgcctagctaatttcctgtcttacattgtctctgttaaaatatcaccctcatgggccatggtggctcatgcctctattcccagcactttgggagaccaaggccgggggatggggatcacttgaactcaggagtttgagaccagcctgcgcaacatagtgagatcttgtctctacaaaaaatgaaaaaattagctgggtgccatgcacctgtaatcccagctacttgrgaggctgagataggaggatcatttgagctccagaggttgacgatgcagtgaactatgattacactactgcattccagcctgggtggcagagtgggacyctgtcccaaaaaaaattaaaaaaaaaaaaatcaccctctttatctgcctcaaattaacatgttttaacctctacatttgtttatgaaaataaaataattctcatcagaagattacagaggaagaggagagctgtcgatatgttcatttctgccaggggattttaaaatgcattgtgcagagtaatgaacaaggataaaagttgttgagcttcagcaggagtgaatgatttgctggtgtcataatggtagcctcattaatgatatcccccactgctcttcataattctgttttctgtttggatgaagggtgataaggaaaacagtgatattggactgactgagggaggatatgtgggttttaatcatggccttgcagctacttagattatgtgtttgactaaattagtgaaggctaaattgctgtcaacagaccaaaaatgaataatggtccaaacttaatagacatttatttctcactcgtggaacagttaagttggatggccctctttggtaggtggttctctttcaaatggtttcttccatcttgtgactctgtcatcctctattccactatgaccagtggaagaggaaagagaaggtgtaagtgtcacaccaactttcttaaattaagccctgacctgaagtgacacaggtcatttccactgaacattccactggaaagaacttagtacatggccacttctaattgcacaggaagttggaatgtgtatccgctaagtgcccagccacaatcctgtaactgtggaagaaaaaaattagtctctgccatagtgaccttggtatagttgtcatatttctgtaggtctcaatttctaaggtataagaaaagggatctatactcaggagatttatcacacacacacccttcttccttagtgattaaatttaaaaggcacaagcaaagtgtttccatcgtttcttcattcgccttgttccaattcaattttgaaggattatgagatgctaaaggtagtattaatcattgtcttctccttcttatcacacccaaggtcttcacagctctgtggctttatccaggcccgagtacaaactgcatcatggccttatagcaaatggaagcttataatgtgagatgaaataattctgaagttttagttgtaggcaaatgtattggtatgatactagttgcttttgaaatataacttgtttaaatagtctacattttctctggaaaataagaattttaaatatattttaaaacatctaacaaagttggctagagcttgagtcaattgattcataaatttggtctgtgttagcaatttagtgcaaggaaattgtcttgatagttttgtaaccaaagttgggtaataggaattgttttttaaaactttaatttttttgagacagtgtctcgctctttcacccaggctagagtacagtggcattaacgtggccttctgtagcctcgactgcctggcgtcaagtgatcctcttttacttcagcctcccaagtagctgggaccctaagtgtgcaccccctcacctggctaattaaaaaaattttttgggccgggcacggtggcacacgcctgtaatcccagcactttgcgaggccgaggcgggcagatcacctgaggtcaggagttcgagaccagcctggccaacatgacaaacccagtctctactaaaaaatacaaaaaaattagccaggcgtggtggtgggcacctgtaatcccagctgctcgggagtctgaggcaagagaatcacctgaacccgggagtcggagtttgcagtgagccragattgcaccactgcactccagcctgggtgacagagtgggactccatctcaaaaaaaaaaaaaatttctgtagagatgggggtctcactatgttgtccaggctggcttcaaactcctgggctcaagccgccctcctacctccatctcctaaagtgctaagattacagctatgagccaccatgcctagccagaagtttcattttcgttttttgttgttttttttttttttgagataagatctcagtctgtcacccaggctagagtgcagtgccaagatcttggcttactatggcctcaacctactgggctcgagcaattctctcacctcaacatcctgagtagctggggctgcaggtgagcaccaccatgcctggctaattttgtttatttttttgtagagatgaggtcacactgtgttgcttaggttggccttgagctcctgggctgaagcgattctcctgccttggcctcccagagtgctgggattacaggcacgagcccagaagtttcatttttatgtaaagacttaatttttagctggagcattgtgggtcatgcttgtaacatcagcactttgggaagctgaggcgggaggattgcttgaggccaggaattttagatcaggctgggcaacatagcgataccctgtctctacaaaaaaacaaaacaaaaaaaccccacaaaattagtcaggtgaagtggtgtatgcttgtagtctcagctacttaggaggctgagacaggaggatggcttgatcccaggaggtagaggctatagtgagctaagatggcgccactgtattccagcctgcatgacagtgagagacactcagaaaaaagtctcagagaaaaaaagaaaaaagacataattttaaaaacttatttagcccacactgctttctttttggaaatgatagtaacattcacaactaaagtaagttaattatagtttaagggctgggcacagtggctcacacctgtaatcctagcactttgggaggccaaggtgggcagatcacgaggtcaagagatcgaaaccattgtggccaaaatggtgaaaccccatctgtactaaaaatacaaaaattagctgggcatggtggtacacacctgtaatcccagctacttgggaggctgaggcaggagaatcacttgaaccctggaggcggaggttgcagtgagccragattgcaccactgcactccagcctggcaacagagcaagacgccgtctcaaaaaaacaaaaaaaacaaaaaaacaaaagttagttttctggtgggctcacacatgtaatcctaacactttggaagccaaggtgggtggatcacttgaggtcrggagttcgagaccagtctggccaacattagcaaaactctgtcyctactaaaaataccaaaaattagccgggtgtggtgatgtgtgcctgtaatctcagctacttggaaggctgaggcaggagaattgtttgaacctgggaggtagaagttgcagtgagctgaggtctcgccactgcactccagcctgggcaacagagcgagactctgtctcaaaagaaaaaaaaaagttctcagtgccatttaaatttcagtagaacttggacctgcataattctaattttagagattaacttgtttgctgatatactaaagttatctgtatattagaagaaaatatttctcataagaaatgcccttgggccaggcatggtggctcacacctgtaatcctagcactttgggaggccgaagcaggaggattgcttgagctagggtttcaagacagcctgggcaacaaagcaagacactgtctctattaaaaaaaaaaaaaaaatttggccaggtgcagcgatttcatgcttgtaatcccagccctttgggaggctaaggcagatggatcacttgagttcaggagttcgagaccagcctgggcaacatggcaaaaccccacgtctaccaaaaatacaaaaaattagccaggcatggtggcatgcacctgtggtcccaactactcgggaggcttgatgtgggaggattgcttgagcccaggaggtagatgttgcagtgagccaagatcgtgccactgtactccatcctgggtgacagagtgacagcctgtctcaaaaaaaaaaaaaaaaaaaaaagaaggccgggcgtggtggctcacgcctgtaatcccagcattttgggaggctgaggtgggcagatcatgaggtcaggagatcaagaccatcctggctaacacggtgaaaccctgtctctactaaaaatacaaaaaaattagccgggcatggtggtgggtacctgtagtctcagctactcgggaagctgaggcaggagaatggcgtgcacccaggaggcagagcttgcagtatgccgagatcatgccactgtacttcagcctgggcgacagagcgagactccgtctcaaaaaaaaaaaaaaagaaatgacatagagtaagatatatatttggaaaatgtgtgtgttgctattttttttttttggcagtagaggggtgctgaatacagaggactttattgatggtgcactacaaagtggagctttctaggcctatcccatttttcagggggtctggcatggaaaccgtgtctgggaagggagattctcagtgtgatggcgggggactgagtggggcaggactgcacagcagctgagggcctctctcttacttacatggtctcactggggctggtggtccaggaggccatgtgcaccataaggtctaccaccctgttgctgtagccaaattcattgtcataccaggaaatgagcttgacaaagtagtcattgagaacaataccagctccaacattgaaggtggaaaagttgttatcactgttagttggcagagacaacctggyactcagagtagcccaggatgcctttgaggggtcctcccacgcctgcttcacctccttcatgatgtcattgtatttggcaggtctctccagatggcaggtcaggtccatgatggacacattggctgtggggacatagaaggctatgccagtgagctccctgctcagcttggagatgactttgcccacagctttggcagcaccagtaggtacaggagtgatgttctggaaagccattgcaccacagtttcccagatgggccatcagtggtcttctggatgtcagtgatagtagcatggatgaggtcatgattcctcccatgatgccaaagttgtcatgggtgatcttggccagtggtgctaagcagttagtggtatagaaggtttgctgggaattgcgaggtgtttttttacttttcatggttcatgcccattacaaacatgggggcatcagcagagggggcagagatgatgaccctttcggtttctccttttaaatgagccccagccttctacaaggtagtgaagatgccagtggtctccacartgtaattgtggtggcatcacccaatttgattttggtgggaatttgctcctagaaaatggttatggtattttcattgatgacaagcttgccattctcagccttgactgtgccacggaatttgccatgggtagaatcatmwtggaacatatagaccgtgtagttgagggcaatgagggggtccttgatgagacaatatccacttcgccagagttaaaagcagccttggtgaccaggtgtctaataaggccaaatcagtttacctggctttcactttcattgtgatgtctcagggatgtgatgggtgttacatgagaagatgtggctgttgaatgggaggaacagaaagtgtaaattttttttttaagaaaaaaatgaattattgactgtagtaattgcgtgatttcattctaataggtcatgctgcaatgatatattgctgtaacaaaccatcccaaaacttagtggtgtaaaacattcattttattatgctctggttctgcagtcaggaattggatggggcacaccagagtcaggttgtctttggcccatgttgtctgggcatcaggtggaaaaacatgacgtctgagggatggagtcattgaaggcttcttcactcagaagtttggctattggtactagcagtcagctggagtttgtcaacacttatccttggcctctcccatgtgtctgtcctgagctgttcactgcttggtggctaccttctaagagtgagcatctcacaagcaggtgtcttaagtgaggaaatggaagctgcagcttcttaaacctgggaattagtagagcattacccctgctgtattctattagaggtcaagccatcactgaagccatattcaaggagagggatcgtgcacctgacctctcatcacatttggcaggtctctccagatggcaggtcaggtccatgagggacacattggtggtgggggcatagaaggctatgccagtgaccttcctgctcagcttggagatgactttgcccacagccttggcaggcagcaccagtaggtgcaggagtgatgtaaaataattttgtggccatgttttaaaatcatcccaggttgtgacagcagtgctgttgatcgtgtaatcacaatttttttaagctacttttcaatactttgttagattatttagattctttttttttttttttttttttgaggtrgagtctcactctgtcaccaacawtggagtgcagtagcatgatctcagctcactgcaatgtccgcttcccaggctcaagtgatcctcctacctcagcctcccaagtagctgggaccacaagtgcatgccatcatgcctggtgtgtttttggtaaagacagggttttaccatgttgcccatgctggggttttgtttgtttgtttgtttgtttgtttgttttttgagacagggtctcactctgtcgcccaggctggaatgcagtaccacaatcacagctcacggcaatgtctgcctcccaggctcaggcgatcgtccctcagcttcctgagtagctgggactacaggtgtgtgctaccacgcccagctaatttttgtattttttgtatttttttgtagaggcagggttttgtcaagttgcccaggctggtttcgaacttctggcctcaagggatcctctgcctcgccctctcacagtactcgaattacaggcataagccaccactcccggccttagattcttaaagctttctttccttgctartgttttatccaaaacatttttaatcccttgagagtattcccatagtttccagaagaaaaaggtatgggttggttttagtagctacgttcagtcaggaaacattttaaattattaactgttatactaatggtatgaaatggatactaatgtcatttttctttctttctttttttttgttgagatggagttttgctcttatcgcccaggctggagtgcaatggtgcaatctccactcagtgcaacctttgcctccggggttcaggtgatcctcctgcctcagcctcctgagtcgctgggattacaggcacacgccaccacgcccggctaatttttgtatttttagtagagactgggtttcaccatgttggccaggctggtcttcaactcctgacctcaggtgatccacccacctcagcctcccaaagtgctgggattacaggtgtgagccaccgcggctggccaatgtatgctttttaatttaaaagaatgctatatttgagggttttgaaacgaaatataatttattagcttatagggtgatgttataacttaaatacaggacagtatccaaaagctgtcctgttaatgcataacagataaagatttcagatcttttgggatcttagacatagtaacatgtgattaattattatattccaaaccatgtaactcccagtactcatcccattatgcacaggtcataggctggggcagtgaggcagtgagggggtttcatgacagcaacattgtggtgctgcctcaactttttagatgacatagcctgatccccagacactgcagtcccacaccttaagaagttcaggcgggtactctgtatttcccttttccagtattccatcctcatcccttctggttgaggctctgggaggtcgaggtaaaaaacactgcaatcattcagagaacagacatgcctccgctagtctctcactagacctaactgctctggtacaggctggattgcaaattgcttcgttttgttttgtaattacctcatctcccaatcaagtgtgtgatatggtatcttaaacagaataagtacttattaaatattcatttccttgaaattcagttgttttcccactttgtccctctgcagttttcttctcttcctctttttgatcaaggcctagcactgagatgacattatcagcctgcctctctggactctctgtgtcctctagagagaataaccagtgaaagaagacttggcatcaaggacagatacttcttcagtttttcttagtcttttccctctcaatttacagtccatagtgagggagaaatgaaagctacacacagaagcattttgtcattcatgggtggatagcttaggaagaaaattggtctccaaggaaaaggtttaaaacagacaaacaaatgataagtacttgccagaccaaacttaaaccatcatgcaaaggagtaatcctgaaattacttgggataaatgccakcctttattggatgctcttttaatttttacatattatgacttattttcaaaatgacagcagacagaaataactaaaagaattcaaagcctggaatagtgcattttctacagctgtaagctatttaaaattcttctcatgttactgtttgctatccagatggctttctggcactggttcagttcctagatgtgagagctgttggttagttactcaccagcaccaccacacacttgtacaatttggctcatgactcactctcattgcaattacatgtgggtactctgctacacaaacagtcattcctgattgtcatgatggtacttgtaaacaagaaccagaattgattggataccatttctagaaggaagatttgttgacattcaaaagcacccacctcagttagtctattggacccattgccactcattggagtgagaaacagaagcagtcatctagacaatgaaacttttgtctaaaatatatacttgaatgataggtgcaaaagtgtatccagtgagccacaattatttggatatttgctttgctcccatactgttacctaaagtgattaaaaaacaaaacaacccccacctcttacaaaagaagtcagatggtggtaggaggtttgggagagggttgctatctgaaagagacaaacaaggagtctcctgagatgctggcagtgttctttgtcttaacctggatagtggtttgctttgcaataggtatttgctttccaaaaattcattgaactgtacaattacatgttgggtatttttgtttatgcgttattagcaaaagtgtttaaaaacagaaaatgctctcctgtaatgtaggagaattcccttagttatatcttcaaaggctagagaaggtctctatgttaatgtagtagatattggtctttggtagtctttgtcctattaattttatctatttagggaaataatcatttttaccttaaaacgtggttattgtcaaacagtgattggaatagcttaacacttaatgatagttcccatgtcccaaatactgttcacttgaatgggtttcagcaaggggtggagagggtgaggagagaagactgtggggatgaaatacatttctcctggaaatacatatatccatttggaataacttatcttgttgatgttaggggtaaacacggtcgaacatttagattagaaaagaggaaggtagactaaaaactagaaatctgaagagttttattagcattgcttaataaaaaattatgtgtttggaagaagaccatttaatttttaaattttttttccatttcaaggactgtattaagtaacttaaaatggcatattttaaagaggctagctgtatattttggaataatagagtgatatgacttttattaaatttttttcatcagcccttttagtttgatgaaataataccaataatgtcctccctctccactgaaataccagtgttatggattatatgtctaaatttatctttatacttttttttttctttgacagtatctcactcactctatcgcccaggctggagtgtagtggcgtgatctcaactcactgcaacctctgcctcccaggttaaagtgagtctcctgactcagccccctcagtagctaggactacaggtgcacgctgccatgaacagctaatttgttgtattttagtagaaacggggtttcaccgtgttgcctaggctggtcttgaacacattagcccaggcagtttgcccgccttggcctcccaaagtgctaggattacaggtgtgagttaccacgtccagtcaatatggctttatataagaaatatctatcatattcaattaaattccaatattttaataaagaattaaagcatgcaaagcaggaaacatacattctagaatatcttcctacggtgaattgttactaggcaaaaaaactggccatgattaaggcactactgccacctgatggcacatagtctaattacaggtaaaagtatcatgaaaagtcagctttttgaatgagtgacataaaaaagtgactcataaatttttagcgttttttttctttccccacgagcagcgtctttcnnnnnnnnnnnnnnnnnnnnatttttttagggatggggacttgctgtgttgcccagctggcctgtaactcctgggctcaagcgatccccccacctcaggctccagagtagctgggaccatgggcaggtgttgtatttagattctattaaagtcagtgttttcttgtagcttcataaaccattacaaattgttgccattgtgttatctgaaaaaaaatgtagtttgttaactaaaacgtttttctgcagtgataaatatcggcttgaacccaaatgatccaagcctgtggggagatttagactctagcctcgcaaatatatctacacattccatgtgtagtagctgggtgctgtaaacccagccaagcatgaagctgaaagccgagaatcactatgacccaaagctggcggctgaggcaggagaatcacttgaacctgggaggctgaggttgcagtgagccaagatcacaccaccgcattctagcctgggcaacagagcaagactccatctcaaaaaaaaaaaaaaaaaaaagagaataaatagccgggtgctttggctaatgcttgtaatcccaaaactttgagagaccgaggtaggaggattgcttgagctcaggagttcaagctcagcctggggaatatgtagcgaaaccttgtctctagtaaaaaaaaaaaaaaaaaatcaaaagaatgatgtgggtgtggtggtgtgtgcttacagtcctagctactcaggaggctgaggtgggagaattgctggagcctgggaggtcaaggctgcagggaaccatgatcgtgccactgcattccagcctgggcaacagagtaagaccctgtctcaaaaaaataaataaataaaataaaataatttttaaaaatacagaataaattgctaagttctaacctaagtccttcctttggacccactcaaagtgtctggaacaatagaactttaaaagagtgtataaactgtatgccatcattaaaggcacgttgaataaaagaaacatttattttatagttacttttgaactgtatgagtgtctttccttccacccttaattgccgcgcattaggttatacttgcagttttttcttttaactttaaacacagttctaattctaatgtgtatattagtttatatttggatttttttcatgttatttctaaacattgccacatattcttgataaacatgattttaaatgagtgcaccaagtggatgccatcaggtgggtctgttatttttttaaatttttcatttttatatattttgctttatacatgaaactttttctgtattcaggtttgtaaataggtacattccagaactggaattaccaagttattcaaggctcagtgcctatttgcaaattttttttttttttttttttgagactgagtcttgctctgttgcccgtgctggagtgcagttctgcaaacagggttcactgtagcctccaccttctgtgctcaagagaaagagatcctcctccctcagcctctcgagtagctgggaccacaggcatgtgccaccacacccagccaatttttaaatttttgtagagatggggtctcactatgttgcccaggctggtgcagatgttttgtaaaagctgtttagagtgccatctttgatttgagaggataagtttaaatgtcattttattataaatgatatgatatataatgttatagcaattctttaataatttgtggaattactttagaaatagctcttacatataattatagcaattcggaataaataatcacctttagaaaatgaagttctagggccgggcgcaggtggcttacgcctgtaatcccagcactttgggaggccgaggtgggcagatcacgaggtcaggagattgacaccatcctggctaacacgtgaaatcccgtatctactaaatacaaaaaatagctggttgcggtggcgggcgactgtggtcccagctacacaggaggctgaggcaggagaatggcatgawcccgggaggcagagcttgcagtgagccaagatcgcgccactgcactccagcctgggtgacagagcgagactccgtctcaaaaaaaaaaaaaaaaaaggcaaaatgaagttctatactgttcagtttttaagtacccattataatgcatacttcaccatgaacacatcaacagttggggctgatttgttgtctttgagcaacgtcgggggtagggaccaaagcccagatgaatcaagatcccataccttaagttgcctctgaatgaaacctcaagttgtgatagcaaatgtagtatttaaagaagtaatgtggccaggtgcagtggctcacacctgtaatcccagaactttgggaggctaaggcgggtggatcacgatgtcaggagttcaagactagcctggccaacatggtgaaaccccgtctctactaaaaatacaaaaattagccgggcgtgatggcaggtgcctgtaataccagcttctcgggagactgaggcaggagaactgcttgaacctgggagccggaggttgtagtgagccgagattgcaccactgcactctagactgggtgacagagcaagacttagtctcaaaacaaaaacaaaaaccaaagaagtaatgttttttcttttatattttaaaaagaattcttttttttttccgactcactgtaagctccaccttctgggttcacaccattctcctgcctcaccctcccgagtagctgggactacaggcacctgccaccatgcctggctaattttttgtattttttagtagagatggggtttcactgtgttagccaggatggtcacgatctcctgacctcgtgatccgtccacctcagccccccagagtgctgggattacaggcatgagccactgtgcccggccaaaaaaaatctctttttaaatatctcctatgattttggttgaatttgttcacctatagaacaaatttatgttgttttctgcttatcattagatgtaaaggagtaaagtccagtgggttctgctggcacattggtggggaagctgagaacttttaaactctttcccctttctccagtgaacaatcgacaggatatgggttatagttacagttaaagggtttattgaactaattgtcactgctgaagttcctgtgccctctgatagcttccttgaaaagttttcatagtttaaaaactctgcttgtccttagcctttgatctcttgctttgatgctcaaacagaagaatgatacaagactgaggatcttgccaggcaaggtaggcctgtgaaaagacatttcctttaaatacaaaaagaaaaaagaaaaaggggaaaattatgctaattgctttggggaaaaaatctgacttttgggtctgactctgtctgtgtgtattcctggataatttacttaaactctcttagctttagttttcttatctttaaaatgggtagggtctgtaactcctaagatacctccaagttgaaactctgagtcacttctctcaggctgaactgtttgtgtagtcctataaaataagagtgactaagggaaatagcagaatatattttattttcaacctagtggcaataatttaatttccttcaaaatatagctacagaagatttattggtaaccaattggtttgttacctcattttttaaaagtggcatgttacagttttaagtctgacaaaacacatgatattttaattgcagaacaccacattttgtgagtatgccctctccctcaataattttcttaaagggttgtgcatgaagctctgaagagttacatgtcatcttgtggttttagtttgaatatctcttcggtaaatttgttactaaaggtcttgaaaactaagagctagttatactgggtttacattcctctgattagttaagggtctagttttcttgacttagagcttctttacccttcaagaattagccaaaaacaacatagccaaatataggaaacatcattcattggcagatagaaatgtatactgttatgttcattactttgaaaaatataggctacaattatatctggataaattatggagactctgttgctactttgagaaatagtagtgatggcagcggtggaccgtctagaacagctgctgccatcatgccagctgcagcaaggaggtgtggccggggctgcatgctctgtggagctggcgggagctggggaacaaatggggccacatcccttccaagttagtgggtgggagcttcccaggagcagctgcagctacccaaactgtgggtgcagacccgggcctcctgctccatggagcaggcaggagcacactccttgccattggccccccagccccttctctcccatgccagtgcaactgcccaaccaggcatccccacactccttaggggcccaagaaggcccactctgccctctcaggctcggaaatgcctgctcccactgtctggcttttccctattgtcggcacccagtcygaccttggagcagagtcagggccaagcccaagtgttgtcacatcccagccaggtgtgcacatgctcagggtagtgctgacacgccagccccctgccaccttggccccctccagattttgggcaccaatgaacataggagggaagctgaggggaggctgagggcagcttggcgctgacctgtaggcggtacctacagcttgggtgccatgatcagcaacaggaggcagacaggtttctgggtggaagtaggttgggtcctcaatgagcctccatcttcaggccagggagggtctgaaggctagggaccaggctgccagttccatggactagagtgggaacttgtgccttttccgggcctgcccatggctgcctgtggaccagttggcacacacttccttctccctgaggcccataaaagccccaggctcagcctgagctgagcagacatcaggatgaccagctgcaaagaagagctacccattccagggcctcctcttggttgagagcagcagacatcaggacaacaggctgcagacaggagctacccactccagggcctcctctctgttgagagcagcagacatcagcacaacagggtgcagagaggagctacccattccagggcctcctctctgctgagagcagcagatgtcaggacagccagctgcagagaagagctacccatttcagggcctcctgtctgctgaagagctgcagagatgacaggatgacctgccttcagagaagagctacccactccaggtcctcctcttagctgttgtcactcagtaaagctcctctttgtcttgctcaccctccgcttggctgcgtacttcattcttgggacctgccaattgaggctaaaagaactgtaacacaaacagggctgaaacatgacctttgttcatcgcattgcaggcgaagaggagagaagagctgtagccctttggggagcccagacctgggaactccccgagccaggactgtgacttcctctttggggccccggggttcctgacatctccaagcttccgggtgccaccatgtcccccagtgccagctgtggaagctgcttgtggtacacctggtccagccgtagcctcagggagagctggtgcccgtactggcacctggagctgcctgccctgctgcagcagctggcaagtctgactgtgcaggggctggaccccacacttgctcacacacccattgctgcttcacacagtctcccttggcagtcatgggatccagtcccatagtgtgaatcgagtgcagcctgctaggccaagtgggcagactgagcctagtgggccctgtcaaaactaaggcaaaggygccactggccacagatgtttctggccagaaaaacaacaccccaaggatcctgtaacagtaggaattattttagggcagtgattctgaaagtggactgtgtgaagcccccaaaagatggttttgaaatttgttgggttatgattttgttcttgttggcacagtgattgagggaagtgctactgttaggtaatggataatcaaacatcctgaagtacactggacagttttgtataacaaaaaaagtcttatataaacatgatttttgaattttctacagatatctatgtatttgaaaagcttgttttttgtttttgtttttggtttcgttttttctttgatacagagtctctgtcacccaggttggagtgcagtggcacgatcttggctcactgcaacttctgcctcccaggttcaatcgattctcctgcctcagccccccaagtagctaggattgcaggcatgtgccaccatgcccggatactttttttttgtctcaaaaaaaaaggggaatactgaatatgacaaaattgaaaatcattcttctggagaatatttagcttaatactatatatctccttagagtgtttacaaagtttgacagccagtctaactcagttattagtaaattgctaatgacaatatcaaggtagatatatttaaccttgcagtattccctctgatgatttactcctagttgggaaaaacatttctaggtctttaaacacaataattctgctttacaggcatcttcagtatgttgctgaatcattagaatatttctgaatcaattgatactttgaatgtgagggttttgtccttgaaattgtagataggggaattgattttggagattggtgtgatgtttctttgtaagtgaggaaggatttttctatttttaagcatgggcaactgttaaaggataaaatttttctttgtaagtgaggaaggatttttctatttttaagcatgggcaactgttaaagtaaaggataaaatttttctttatgatgcacctaaagatggcacaagaaagatacttagcctttgcagtgtattttgccattaaaaaaattttaagacatttaaaatgtgaaatatagcacagatatagaaaagtacataaaacataaaaacttagtgaattattctgaaatgagttttttattttctttatactagaaacaattttcagtctgttggagcttgagaaataaataatggttatccctttgacatcaagggagttcttcagcctatttaaatttaggagaggatgccttatcctgaaaatagcagttttatagtcaaacattagttaaaaaaatacatcattttcagaaacacctataacattactgggattgcaacacagtgagggtgccatctttaagttataggtgagatccattttatgctcttcttcacatgacaggagtttatgtatttgagacatggcagcattaggcaaagcctgatctatgcaaaagaattttatatgtttgttaatattttttactttattcttttaaggaaagatacatgggctacctgaaatgtaggttgagattttgtaaaaccacatgcaaatagacttgaatgtctgagttaagtaatttcaactttttttctttcgccccacttcgtctcactcttccttccgtctcactctgttgcccaggctggagtgcagtggcatgatcacagctcatagcagcctcaacctcctgggctcaggtgattctcccatcttagccttccaggtagatgggactacaggtgtgtgccatgtagtcccatgcacagctaattttttttttttttttttgaagagagggggttttgccatgttgtccaggatggtcttgaactcatgtgctcaagtgatccccccacctcagcctcccaaagtgctgggattataggcatgagccactatacctggctagttttcttaatttaaagagttgtaggatatgtagatatatatggcattttatctatgtattggtaaaatattttgatttcatataaaggtatcacttgcggaggctgtttgtgatatttcttagagtaagtgctgaaagactatattgaagattgcaaggttcaagttttcctgtcaagcatgatttaaatcaaatttttaatatccaatataattgtcctactagcagattctttttttttggaaatggagtcttgctctgtcatccaggccggagtgcagtggcatcatcttggcttactgcaacttccgtctctcagtttcaagcaattctcctgcctcagsctcctgagtagctgggattacaggcagccatcacgcccagctaatttttgtatttttagtagagacagggtttcgccatgttggccaggctggtctcgaactcctgacctcaagtgattcacctcccaaagtgctagtgggattataggcgggagccactgtgcccggcctccttcttacaaattctgtgggatttgttactcatttcttcatttaaccataagtgattatttattgagaggctaatatgtgccaggagctaaagagctagaaataatatgagactagggagagatgagtacacagtgagctttaatacagtgtgctccagtgttgtcacaggtatgtcctgggtgcttgagacacaccgaggagtatcagggaaggtttccaggaatctagaataataaaatttggtcaggcaatatggagctgaagacatcttaggaagagggaataatctgtttaaagtaggaggcaggagagaatgtgagatatgctggcaagtacctgtgattcagcatgactggactaaggatcctgtgtgttgaatgacacatttagagaggaaggaaagtaggggcccaatcatgaattcattctcataattcaatttttaaattagtcttgctttgttgcctgtgctggtctcgaactcctgacctcaagtagttcttccaccttggcctcccaaagtgctaggattataggtgtgagctgccatgccctgtctcataattcattttattttttattttactttttgagacatagtctcactcttgcccaggctggagagcagtggtgcaattaacagcacactgcagcctcagcctcctgggctcaagtgatcctcctgccttagcctccctagtagctaggaccacaggtgcatgccacaactcttggctaattttttttttttttcttgatagatgaggtctcactatgtagcccaggctggtcttgggctcctgggctcaagcagtcctcctgccttggcctcccaaagtgctgggattatagacatgagccaccactcttagccttgtaattcattttagatataatcatttcatcaagaattttttttttttttttttggagatggagtcttgccctgtcgcccaggctggagtgcagtggtgcgatctcggctcactgcaacctccgcctcccgagttcaagcgattctcctgccccagcctcccaagtagctgggattacaggggcgtgcctccatgcccagctaatgtttgcatttttaacagagacgggttttcaccatgttggtcaggctggtcttgaacttctgaccccatgatctgcccgccttggcctcccaaagtgctgggattgcaggcatgagccagcgcgcctggccttcatcaagaaatttttgtatctaccttaatgcattttctctaatggcttagaaatttagaattttatatcttggcagttgatgctataggatgggagtgctggtgagatgcagtcagtctctttgaaaagattgctgctctgggcattatgtctcagatgccttaccatttccagctgtctggtaagggtgagatcccagagttttatttttctagtttcatgctcttttattagtattgtattaattgggtgatttggtttcagttctgagattcttgacaaaaatctgtgttgaagaaactagggacgtgtacaggtttattatgtttctaattctgtgacagagggctgatgtttcataaacccacctcaattttaaatgctaacttctgggccgggcacggtggctcatgcctgtaatcccagcactttgggaggccgaggcgggtggatcatgaggtcaggagtttgagactagcctgaccaacatggtgaaaccccatctctactaaaaatacaaaaattagccgggcatgatggtgtgtgcctgtaatcccagctactcaggaggctgaagcaggagaattgcttgaacctgggaggcagaagttgcagtgagctgagatcatgccactacactccagcctgggtgacagaatgagactccatctctaaacaaatacatacatacatacatacatacatactaactttcatttttcctccagcttttgttggcagctcttggttagacatagtacttgagttacttgttcagtagctggcttccacctctgtctttgcatggtggtatttgaatataagcaaagtatatatatatatttttttattgttgttttgttttttttgaggcagactctcactctgttgcccaggctggagtgcagtggtgtaatcttggcccactgcaacctccaccctctggggtcaagcaattctcctgactcagcctccctggtagctgggattacaggtgcctgccgccatgcctggctaatttttttgtatttttagtagagacaaggtttcaccatgttgcccaggctggtctcaaactcctgggctcaagcactccacttgcttcggcttcccaaagtgctgagattataggctgagccaccctacctggccctgcaaagtatggtctttataagttaatacagcatgttttcattcagcaaatacttattgaatgcttattacttgcaagattgagaagctcctacaccagatcttcaaaggctgctctgaagtgatttgcttaattttaggactagtgccttaataacatgtgtagtgactgtgtagttttgttcgtgtttayggaagtttattggttaagagttcctgagtatagagacctttccatatactgtggtgagaaacagtactttaaaaagcatgttgacaatacctgaattctgtgatcaatcttagcatggctaaaagtaagaccactagacattatatytcctcaaggagcttataatgaatccatatttaaatttcccagattatttcaaagataggttttgtttgtttgttttttgttttttttgagatggatttttgctyttgttgcccaggctggagtgcaatggcacaatctctgctcactgcaacctccacctcttgggttcaggcgattctcctgcctcagcctcctgagtagctgggattacagkcttgaaccaccatgcctggctaatttttttgtatttttagtagagacagggtttcgccatgtcagtcaggcttgtctcaaactcctgacctcaggtgatccacccacctcggcctcccaaagtactgggattacaggcataagccaccgtgcctggcccaaagatagttggttttttttttttgagacagagtcccactctgttgcccaggctggagtgcagtggcgtgatctcagctaactgcaacctccaccttcctggttcaagtgattcttctgcctcagcctcccgagtagctgggactacagacacacgccaccacccccgactaatttttgtatttttatttttttgagacgaagtctcgctgtgttgcccaggctggagtgcaatggtgctgtctaggctcactgcaacctctgcctcccaggttcaagcaattctcgtgcctcagccttctgagtagctgggattacaggcacccgccaccatgcctggctaatttttgtatttttagtagacatggggtttcaccatattggccaggctggcctcgaactcctgaccttgtgatccacctgccttggcctcccaaagtgctgagattacaggcatgggccacagtgcctggctaagatagttttttatagttgatttgttccagctaacattggatttggctgtgtctcctaagtgttttttaaattctttaacagtccttccaccatcttcttcctcctcttcttgatattgattagctggagaaaccatataatttgttttattgaagatgccacattctctacttggctgattgcttccttgaagtatttaacttttttctctgtttcctgtaaactagcacatagatcagatctaaagccttgattagattcaagttcagttttgttttgtgtgaatggtaagtactgactattgcatttcatgaggagacacataatgtctgatagtcccacttttagtaatgctaagatcaggggattcctgtagtgtcaacaagacagacacggacgattgtaaagtttcttctcctttcaccttattattatttatgtctttagcatctattaatgatcattgcctagatctgttagttcattagcacttgcagaattgtgattttctaatttattattctttttccatttattagcaaaagaagttctaaaaattgttttttaatttttatttttttaagacagggtctcactttgttgtccaggctggagtgcagtggtactattttagctcaatgcagccttagattcttggactcaagcaatcctcatgcctcagtctcccaagtagctgggactacaggtatgcaccactacgcctggccaattttttgtatgttttgtagagacagggtcttgtttgttgcccaggctggtctcaaactcctggactcaagcaatccacccatctaagcctccccaagtaatggtattacaggcatgggccactgtgcccggcctcctgtctcttttgatatgacactttcattaatggcataattgttaaatgaaccttggttcatttaactttagcgctcatgttcttccaattattattgttgtatcttcttgaaggaagcccttaaggaataggtaagacttaaatggcactattaaagggtgcatttgttgggatagtgcgtttgttttgatatgaggagtttattcctcatgtgaacataggtctagcagcaggaaggcagaaggcactgtgataccagtctcgggctgtagagtgatgggagagcaagaaaaataggccagagaaatagcacaaggggccttgccatctgtattgagcgatttggtgtttttaatgcttaggggatgggccgtgaggttgatagaaaattgtccttgttggctgggcacggtgggtcacgcctgtaatcccagcactttgggaggccaaggcgggcggatcacgaggtcaggagatcgagaccatcctggctaacacggttgaaaccccgtctctactaaaaatacaaaaaatttagccaggcatggtggcaggcgcctgtagtctcagctactcgggaggctgaggcaggagaatggcgtaaaactgggaggcggagcttgcagtgagctgagatgtcactactgcattccagcctaggcaacagagagagactccatctcaaaaaaaaaaaaaattgtccttgtagagaaagggccctcttgattgcaaattgttcttgttgagagagggccctcttgattgtcattttcattggaatttgcagagaaaaactcagcctaagaagctaatattttctaaataaagtttggagaaaaatcacctgtcaagtgctggttaactaaatttcttaggaccctgtaatccttaagcatgcagtttattcagatgtcaaatatytatgttgaatttgaatcaatgtggtgtgtgtgtgtgtacatatgtatgtgtatatrtttttatttatatgtatataagaataatttttttcctttagttggtggtatggattggataatgtacatatatataatttgtgaagtgataaaagtgtatttaaataatttatttctgctgacttactcttggtttttaaaatatcacattatttaattggcctcctgttacattattggctatattgaaatctaaggactaattgtagattagtggtctttatcatatcttggtataaaatttggctgatggttgttttgctatgttttaattactgatttctagggccccgtggttatgaatgtgcttcagtttcataatgcctcctgctatggcagacatccttgacatctgggcggtggattcacagatagcatctgatggctccatacctgtggatttccttttgcccactgggatttatatccagttggaggtacctcgggaagctaccatttcttatattaagcaggtatgttaataggtataatttctatgtgtttagcatactgtgtcacttgggggaaatatcattctataatagaaaatgttaatgtaaattatatgtgataatgatagtaatgaagtgatggtaattaagaaaaattagtttatgttagctagtttgaaatgtttgtttgggttattaaaactgtcaagaagattttcttttgagttcgtctttgaaattactgtctttgagcttgtcacacttttaaaaatgtgatttttggttcattttctcttctctcctttttcttctcttccccctttccttgactcttgggggaagaaagacttttctgctgttcaccagatatttttccctcagcaggcttgccttttctrttgcattagtttttaaagtaaattgatgagcaccgttgatttgtaaaaaccagcatatacatgaacttgtttttctaaactttctttctaatgtttttcaaaaagctgaacccaatgtgaatatcaggagttacggtatttttaagaaaacatatttatgatatacctctgaaaactcttggctttggacaagcctcttaactcctttccaagcttcttcattagagaaactggaattctaaaatggcatgatccttaaagtaaaaagaaaatacagaattgacttaagcatctcatacgctcatgcatggtgcacctatttttatagtcaccagtgacaagtatggattcctatggctatacttcacattagattaaccatttatctctttttaattgtgaaatatacataacctggaatttactatttagacatttttaggtgtgcattcacagtgctgtgcaaccatcaccagtatccatttccagcacttaaccatcatcccaaacagaaacttcatacccataactgcccctttccctcaattcctttttatttctattctgttttccatctctaccagtttgcctattcttggtactttatataagtggaaacatacaataaatagctatccttttgtagttggcttgcatagcatagtgtttttaaagttcatccatgttgtagcatatatcctagtttcattcccttttatggctgaataatattccattgtatgtatatgccacattttgtatatttatctgttgatgaacatttgggttgcttccagcttttggctattgtgaatattatgctactctgagcattggtgtataaatgtctgtttgaattcctgctttcagttcttttgggtatatacctagaagtgtgattgttggttcacagtggtaattccatgttttaacttttgaggaactgccacactgttttccacagtggctgcaccatataatgttgggaccagcagtgtacaagggttccagtttgtctacatactggccaacacatgctattttctcctcgctccctccctccctctcttcctccctccctctcttcctccctccctctcttcctccctccctccctcttttcctacctcccctccttcctctccctctcctcccttcccctcccctctctccctccctcccttcttccttcctttcttccttcctcttttcttacattatttctttcctttttttgtttgtctaagagatacgatcttgtttgccatattttctgtgtgtgtgtgtgtgtgtgtgtgtgtgtgtgtgtgtgtgtgtgtttaatagtatccatcctaatggatgtgaagtggtatctcattgtgggtttttttttgttttttgttttgtttttttgagacggagtctcgctctgtcgccagactggagggcagtgtcatgaccttggcttactgcaacctccgcctcctgggttcaagtgattctcctgcttcagcatcctgagtagctgggactataggtgcacaccaccatgcccagctaatttttgtatttttagtagagatgggatttcaccatgttggccaggatggtcttgatttcttgacctcatgatctgcccaccatggcctcccaaagtgctgggattacaggtgtgagccactgcacccagcctcattgtggtttttatgtgcatttccctcatgactaatgatgttgagcatctttttatgtgcttgttggtcatttgtatgttttttggagaattatcttttctagacctgtactgatttttaaactttgttttctgttattgagttgtaggagttctttatatattctggatattaatatcttgtcagatatatatgatttgcaaatattacctcccattttgttggttgccttttcattctcttgataatgtcttttgctrtacagaagttttaagttttggtgaagttcagtttacctttttttcttaatgttactattttgagcctttagaatgaaaagtttacctatcattattattattgttgttgcttgtactttctcctgtatgttttatgtaactgaatctgagctgaggattggccacaatttttaactcaggtctgttattttcagctcttagcttttgtactggctgttaacaaaatatgcaatccctttttgtttttgtgtggtgaacttcttttatattatctcatccaggagacatggaaagagatgttgagagattgattatgatcattctgacaggacagtgttagtaaggatacccctgataaaagaaaagagtgcaggacaaaaataatttaaatattgtatggaggtggtgatacatactttaaattaaaatttttttttgattactcctgatcagtagtttctgcttacaggaaagtgaaatatgaaagttttcattgagtcttacttgtcatagataatttgcttttagtaatttcatttataatgcattttttgtgcactatgccattatattaccctacaaacatgggataataccatatatactctcctataatttgctgttgtaagaaaacttgaatattttgtatggttttccatttcagaatgaatttatatttttttctatttttctgaatatatttctattattttcaccrttctgtaatattctataattcatttaaccaatcttttattgctaaacatttgatttgttcatagttttttatttttacaaacagtgctgcagtgagcatccttatatctttgtacacttgagcaagtgtttccattccagaaaatgtcttattttttctcatagatgttatggaagcaagttcacaattacccaatgttcaacctccttatggatattgactcctatatgtttgcatgtgtgaatcagactgctgtatatgaggagcttgaagatgaaacacgaagactctgtgatgtcagaccttttcttccagttctcaaattagtgacaagaagttgtgacccaggggaaaaattagactcaaaaattggagtccttataggaaaaggtaaattaaaaaataaaaaaaaagtacaaattcttaatatatctatttatataaacatatagtaagtatatttaagacattgcttttcaaagtgtggtccatggaccactgctgatctgtaaattgttgccagtttgagataaggtaagtatagaaattgagaataaatgtttagaaacccctttagcaatatgatattgccatagcatccaagggcttatgtttagtatatgtttttgttgtctaatgatttattatttatttaatttttaaaaatagagacagggtctcactgtgttgtccaggctggtctcaaactcctgggctcaagtgatcctcctaccttggccccccaaagtgctgggattacaggtatgagccactgtgcatggctgatttatttttattttacaaaaatattgatctttgatggattggaaagaaaaaagttgttgctttacctcagattgtttgagaagtccttgactaaaggagacattatccttagtttcttatgaactgctcctatagaatgaacatattttatacacaactctctatgccaaccaagactttaagctgtttgatgtttccataaataaattattgacaaattttacttcttaactgaaattatctttaagtagaagttattttggtagagagtcaggaaatatcatgtccacattattccttgcaaatttattccatggaaaattgtgagtaacacaatcaagaacatggaggagtctctcttgctatataacattaggagtctcaggggctaatgttttatcaatatcttgctttagagagggtactgacttgaattaggaactacaaaaggttactgaggaggggactttatagtttaaatacaaaaccagaaaatccactggagatttatgtatctagattgggtacctgtattgatcagattcactgttataggataatatagtaccatcccctttaaaatactattctttgatcttaaccctataataattcaggctagctaatgattatactgtgggactactccctctgagtgcatagaaccttgttagtttactaagggatactctgatatttaaaaatatttgattacttcagagggtggctagtttatttttggcaataaatttttcccagttaacaagtttatagttatgtatcatacaaaattttttcttatatattagtgacatataattagaaagcattattagaaagcatgcctttctattttctagagctacaaaggtgtgttttgttttgtttgttttttgtttctgtttttgtttttttggtgacaaggtctcgccctgttgcccaggctagagtgcagtggtacgatcatggctcacttcagccttgactcgaccctcagtcgcaagcgatcctcccacctcagcgtcctaagtagctgggactacatacagatgcaagccaccatgcctggctaatttttgtatttttattatagtagagacagggtgttgcccaggctggtctcaaactcctggactcgagctgtctgcctgcctcagccttcagagccacagcacctggcccaaatatttttatagaatttaaatttttgtccattataaaaggttttccctttgttctcatgcccataaaaagttgaagaatatatggaagaggagaaagaaagaaaaaaaatcacttatagtcttatcatccaggacaagtatattgaccgacaatattttgatatatttcttttgaataaattatatgtatttcaaggcttttatttgtttttgtttctgtggattaaaatacttagcttttctgtattctcatgctaatgtaagaaagcaaaccagaaccacattgatttttagggaagctaaaatatttgttaatccaaaaagtaccacagagtaggccatgttctttttgatttttttttcttttttaaatagggtctctytctgtcacctaggctggagtgcagtggtgcgatctcagctcactgcagcctcaacctcccaggcttaagtgatcctcctacctcagcctcccgagtagttgagaccacaggcatatgccaccatgcccatgtagattttagcatgttgcccaggctggtatcaaactcctaagctcaagtgatccacctgcctttgcctcccaaagtgctaggattataggtgtgagccattgtgctggcctttttatttttatttgtatttatttatttgatacagagtctcactctgttgcccagrctggagtgcagtggtgcaatcttgactcactgcaacctctgcctcccaggttcaagagattctcctgcctcagccttctgagtagctgggattacaggcacctgccaccatgcccagctagtttttgtatttttattagagacagggtttcaccatgttggacaggctggtctcaaactcctgacctcagatgatccgcctgcctyggcctcccaaagtgctgggattacaggtgtgaaccactgcgcccagctgtttttgtttttatttttaaattgagacagggtcttgccctgtacccaggctggaatgcagtggtgcaaccaccagtcactgcagcctcagcctcccagggtcaagtgatcctcccacctcagcttcctgagtagctgagtgcaagccaccaagtctggctaattttttctttttttttgtagagatggaatcttactgtgttacccaggatgtgggccaagtttcttcaaggcattggtatctctctgaaatttacctccttcccaacatttaccaaaacatggattcattggccaccattacctcttcctatgcctgccaaatgtggcaaataaaaatattgaagattgaaatattacatatgctgtgcttatgctaaaaacatattcattgtttatctaaaattcacattgaattgcgcatactgtttttttttaacctggcaaccttaccttttatcctaccatagcataggggtataatctatattagactaatgaatttaattttttctttttttttttctgttgagacgaggtctcactctatcacccactctggagcatagtggcgcctttttggctcactgcaacctccgcctcccaggttcaagcaattctcccaccttggcttcccaagtagctgggactacaggcatgcaccaccacgcccacctaatttttgtattctttggcattttgattatatacacaaatttaaatgttaacatttatttaagaaattgagtaagttgtgtatttaagaatgaattttcacttttaatacttgagaagtcaagtcaatttttgcagttgctgatttgtctgtgatgaccatggcttgatgaggccatgcctcctgggaaaaaatatacaattatttcagtttaactttaggaacaaggttgccacctcctctctccaaagaaaacaatagaacctttagagacgtaattgccctgactaggctaaaaataccttttcctgaaagatgatgtggctaatcttttttttttctgtgtttattccaaataattatttacagagctgttgtttgagttctgtttgttctctgtagtaaggtgtatgccaccccatattaatttctccaaacactcagtaaaagaatcgtaatcagaggattttgttagcattctgaaaaacatatttgtaaactcccttatttctcctgacctatctaaacctgtggtataccttaagtgagggaaatagctagtctgtaggattttttttttttttttttttatatacagagtctcactttgttgcccaggctggagtgcagtggcgtgatcttggctcactgcaacctctgcctcctgggttcaagtgattctcatgcctgagcctcctaagtagctgggattacaggattgcatgactacacccagctaatttttatattttttgtagagatggggttttgccacattggctaggctggtctcgaactcctgacctcaagcgatctgcctrccttaagccttccaaagtgctgggattacaggtgtgagccaccatgtccgacctagtctgtaggattttaacaccctctttagtatgaataaattgttcactcagtactttttaaatataaaaattatatttgactataaattttacagtagccttaaggaaaatttaagctttgctgttagattctcttasaagaaggtatgtagggtattaactaggtttaaaattaaattacttagcttaaagtgttcgttatttttgataaaatttcttttttttttttgagatggagtctcgctctatcgcccaggctggagtgcagtggcgccatctcggctcactgcaagcttcacctcctgggttcacgccattctcctgcctcagcctcccgagtagctgggactacaggcacctgccaccatgcctggctaattttttatatttctagtagagatggggtttcactgtgttagccaggatggtctcaatctcctgacctcgtgatccgccygcctcggcctcccaaagtgctaggattacaggcgtgagctactgcgcccggcctaaaatttctgtatttaagagatctttatggtggttcccaaatttagattgtatcagtttcttaaaatgaatatgctcagagattgggattcagtgtgtctggaataaatgaaagctgtatttttttatgtgattctaacagttacatgaacagggtcccttattcataatatattgaaaaacattaccaaaacattagtgattgcagttcagtagtattgagtgtttatacttgaaattttaccagtgaccgtgggtgatatggtctctgcttagacctcacaatccagtgggaagtgaggatcagtaaacacagttttattgcaatgtattaactgctatgctatgtcagaaagggtcaccttcaaatactgtgtgatctcacttaaatgtggaatctgaaaaagttgaactcaaagtaaacagttgaatggtagttagcagagccagttgggggcatagaaaggggtgtattgggctgggaaaggggagacattggtcactgggtacaaagtttcagttagcaggaataagttctggtgttccattgcaggggttctcctctgctccctgttgctggttaggaaccaggccgcacagcaggaggtgagcagcaggttgggtgagcattaccacctgaacttcgcctcctgtcagatcagtggtagcattagattctcataggagcttgaatgcgaagaatcctattgtgaactgcacatgtgagggatctaggttgtgtgatcctaatgagcgagaatctaatgcctgatgatctgaggtggaacagtttcatcccaaaaccacccccacccccattctattgcatagcaccgtgactatagttaataataatgtattgtatgtttcaaaatatttatgagagaatttttaaatgttctcttcacaaagaaataataaatatttgaggtgatagatatgctaattagccagatttgatcattccacaatgtatacatgtgtcaaaacatcacattggccgagcttgggggcttattcctataatcccagtactttgggaggataaggtgggtrgatcacttgagcccaggatttggagaccagtctgggcaacatagcaaaaccccatctctacaaaaagtacaaaaaattactcaggcatggtggtgtgtgcctgtagtcccagctacttgagaggctgaggtgggaggatcacttggcttgagcccagaggttgaggctccagtgagctgtgatcatgccactgcactccagcctgggcgacagagtgagaccctgtctcaaacaaacaaaaaaactctatcacattgtacctcaaaaatacatgcaattattatttgccaattaatgaaaaacaaaacttttgaaaaggaaagtcaccttaaatcaattaggtgaatcagggatgacctcttagaagatgtatacctacactgagccatcaatgctgattaggaatttggcaggtaaagagaggtggagaaaggaaaaaacaaaaagaaatggcacatgtgaagaatggcctattcaaggaaaagaaattgattatgggtggtgtagggggacagataggacaactaggaaagactagagaggcagccatctgcagagcatacagtgccatccaggccatgtaaaaagtagagctttactactaagaacacttgggaagctattgaagaaatataggtaggggagtaacgtgataaatttgcattttagaaagattatttaggttgtagaatgaagagtggattggagggattaagaatttgaatagagaaattagtgaaaaaatgttgtaacccaaaggaagggtgatgatggccaggattaggttaatgtttacaggaattgagagaagtggacagagttgagagacatttagaaggtgggttaaacatgatttgtagcagattaagggaaataaagcatttgatttttgttagatgtatatattattgggtacttatttccctttcgtcacctgtaatacctattgcctgtgaatagaatgaatattaacagtgcactaaaatgcttcagccattccacccaaattacagtccattcatagctaatttagagtaatgtattttattccagatctaaaactatccaggaaatcattttacctttgctgtgttatacctttgctgtgttttatttttctatatttaataccacaaaattgattctaggatatatttttgaaataacaactattgttttcagtgcataaaagtaaaaagacaatgcaacccttactgacatgcatatgttcaaatagtatagtatagattaattttatggaataaaaagtaactttcctcactgtgcattcctccctaatactacaaaataccactagcaatagagtcatctcaagtatccaaaacaaaaacttatgcatattctgtattcttccttttgaattttcagaaaagggattttacctgacccattctctacctacttttaaaaaatatctggtgcccttaaaaacacaaagattgattgtatttttatctcctgcaccactgtataatgatacatggatgtatctttatttaaccagtcctgaatgatggcctttagattacattttaattattatacacaaaactgcagcaaatattcatatattgatagtatatccataggtttgtagaaataaacaaagaccactcagatgagaacagagactatttatgcagaggttgctatagtaaaagaacttgagcttggcagagactcagaggcaggcaggggagtgggaaagctttacagtgaaaaaaaagggaaggtttcagagatgcctgatgggaaattattggcagcagggagctggaggtgggctaattagaagcaaggcatcttatgtgattggtgttgggttagtatacttggctttcttcgttggtcctgaatctctcaggttgagattrcgattgataaaattgtgaggtctaaggatgtgtgtgtgtgtgtgtgtgtgtgtgtgtgtgtgtgtatgatttctaataaatattgcaaaattgccctccaaaaagttcatattaatgtagtttctcaacaaaactatactagaatgcctttttctctctgccccttccagcacagggtattatcaaattttaaaatatgtgccaacytgataggtaaaaataaatgcacacataaacatttatgtatgttgattcattcttttagatttctaaaattatttactggaataatcataagtttttgaaaaagttgtcatatataattgtcttaatggcagaagtgactaaaaattaagtacaacccatccttcagcaataggtttgaactgtgcagggccacttatacgtggatattttttaatacgtatattgaaactttttttgagatttgtgacaatttgaaaaaacttgcagacgaatcacagcctagaaatagtgaaaaaattaaaaagttaagtgtcattaatgcatgatatgtatgtatcatttactaccataaaatacacataaatctattataaaaagttaaaatttcaaaacttacatacacagacatttagacaaccatacatggtgccatttgcagttgaaagaagtgcaaacaaatgtaaagatacagtattaaatcataactgcataaaattaactgtattatactactgtaataattttgcagccacctcctgttgctattgtggtgaggttaagtgttgtgagcatatgctcagaaatgccatgtgactctaatcatctccacttgagcagtttctctgtctagtaaattgcatattgcagtaaaaagggatctctccgagttctcatgtattttttaaattgtgtttactggaatactgcaaaccttgaataacactgtgggacccatacaaaatgctacttgtgatcctggaagtacttctaagaacagagaaaagtcatgatattataagaaaaaagttgaatgcagctgggtgcacaggctgaggcaagaggattgcttaagcccaggagttctaggtactagtgtgctgtgattgtgcctgcaaatgccatatatatatatatatatatatatatatatataaggctgaatagcttgatatgtactgtagatggaggtctgcagctgtggttgcctgccatttcgagataaatcaatccagtataagtaccattgtgaaaaaacaaattcatgaaactgtcgccgcagctatgtcagcaggtgctaaaccttgcactttttgtgaatcacctttttatctcagagtaaaaatgcagcttgtatgtgggtgcaggattgctataagaaaggcataccaatagactctaatctgattcaagaaaaggcaaagttatgtgacaaagcaataagaaactgaaggatctagtacaggagaattttaatgctagcaaaggatggtttgacaattttatttttatttatttttatttttaattaattaatttatttatttttgagacggagtctcactctgtcacccaggctggagtgcagtggcgtgatctcggctcactgcaagctccacctcccaggttcatgccattctcctgcctcagcctcccgaggagctgggactacaggtccccgccaccactctyggctaatttttttgtatttttagtagagatggggtttcaccatgttagccaggatggtctcaatctcctgacctcgtgatccgccctcctcggcctcccaaagtgctgggattacaggcgtgagccaccgtgcccggccgatttgacaattttagaaaggtttggcataaaaaaaatcaaggtaacaggagaagttatttttcctgacctagaaatagcagatgagttcccagatgccattaagaaaaatcactgaggagaatagatacctgcctgaacagatttttagtgttttgtttttgagacaagatctcactctgttgcccaggctgtatccttgccctcctgggctcaagtgatcctcccacctcagcctcctgagtagctgggactacaggcatgcaccaccatgcccagctaatttttaattttttrtagagatgaggtctcactatgttgcccaggctggtctcgaacccctgacctcaaggaatcctcccacctcggcctcccaaaatgttgggattataggtgtgagctgccttgtctgaccctgaacaagtttttaatgcagatcaaagtgcccaattctggagaaaaaaaatgccacaaaggtcatttattaggaagagaagtcagcaccaggatttaagacaggaaggctaactactgttttgtgcaaatgcagactagtttgtgatacactttatttgtaaagctgctaacccccaagcctcgaagggaaaaagaaacaccagctgccagtcttttggttgtacaacaagaagacctggacaataagaaccctttttctggattggttccatcactgctttgttctgaagtcaggaactactttgccagtaaggggctgcctttttttttgagatggggtctcacttcatcgcccaggctgcagtgcaggggtgcgatcttggcttactgcaacctccgcctcctgggttcaagcgattctcctgcctcagccccccaagtagctgagattacaggcacacaccaccatgtctggctaatttttgtgtttttaatagagatggggtttccccatgttggccaggctggtcttgaactcctgacctcaagtgatccccccaccttggcctcccaaagtgctaggatgacaggaggattataggtgtgagccactgtgcccagcctagggactgccttttaaggttcttttgatattggatgatgcccgtggccacccagaaccccctgagttcaacactgaaagcctcaaagtgatttacttacccccaaacacaacatctctaatttagcctatcaggaggtcataaggacctttaaggctcattactcatggtactctatgaaagagaacctggatagaacatcatgaaagtctgggagtattacaccactgaagatgccatcgttcatatagaaaaagttgtgaaagctatcaaacccaaaacagtaaattcctgttggagaaatctctgtcccgatattgtacatgacttcacaggattgacaacagaaccaatcaaggaaattaagaaatagattgtggtatggcataaaaggcagcagtggtggtgaagggtttcaagatacagatcgtggagaaatccaagagctaataaacaccacatgagaggaattaacagaaaacaacttcatggagatgagtgcttctgaagcagtgccagatgatgaggaagaagatgtagaagaaacagtgcccgaaaacaaattcacatgcaacagtctgacagaaggcttctgattattcaagaatgctttttacttcttttataatatggccccttctatgataccagcactgaaactaaagcaaacagtggtaggattggtactatacagataaacatttttacagaaaagaaaaagcaaagaagtcagaaattatgatgtatatctgtgaagttacatacagtatgcctgcgtctgctgcctccccttgtacctccttcactcttctgtgtctgccacccctgagacagcaagactaacctctccccctcctcctcagcctactcagtgtgaagatgatgagttatgaagacatttatggtgatccacttcctttttttttttttttttttttttttttttttttttttttggkggagtctcgctctgtcacccagtctggagtgcagtgacacaatctcggctgactgccagctccgcctcccgggttcacgccattctcctgcctcagcctcccgagtagctgggacttcaggcacccaccaccacgcctggctaatgttttttgtatttttagtagagatggggtttctccatgttggtaaggctggtctcgaactcctgacctcaggtgatccacccgcctcagcctcccaaagtgctgggattacaggcgtgagccactgcgcccgaccaatccacttcctcttaataaatagtaaatatattttcacttctttgtgatttatttaataacattttctttttttctaatcagaagagtgctggaataattaacattttctttagcttactttaggaatacagtatataacatgtataacatacaaaataagtgttaactgactatgttgttggtaaggcttctggtcataagtaggctattagtagttaagttgttcaggagtcaaaagggacatgtaggccgggcatggtgactcacacttgtaatcccagcactttgtcagactgaggtgggaggattgcttgagcccaggagttcaagacaacttggacaatatagcaagacctcatgtctactaaaaatttatccagacatagtggcatgtgcttgtgactgtaatttcagctacttgggaggctgaggtgggaggatcgcttgagcccaggagatgaaggctacagtgagccgtgatcacaccactgcactccagcctgggtaacagagcaagattctgtctcagtgaatgaatgaatgaatgaatgaatgttatatgtgaattttctcctctgtagggggttggtgccccatccaccatgttgtttgagaatcaaccaaacaataaagaacaattttatgtttatgggatttttgactaactaaaacaatatatgataaccatttaaaaatcacaatgaactgaaaattcagtctataaaatttaagtgtactaggttttctttggtttgtttttgtttttttaaagactatgaacagttttaggttcacagcaaaattgagaggaagatacagagattttccgtattccctctgcccctgtgtattgtagccattcccatagtataccaagttttggtgaaataataacttgattcttagttttcttctaatatagtattgaaactgtttttcagattcttagtctttctcacatattttaaatgtgatttattaatacttggtttgtaaataaaaacaatgaatcttttatgtgtggctttaaaatatgtattgtgaattactttgtaaaactggtaggcaaactacatttctttatgaggttttgagttgtattttttaaaaaaatataattgtatgtttgtcttctgtacatgagatttattgttttatctgggttttttgatctttaatggtattttcctccctagtttcatctgcttgataaaagccaagcatccaacatccaagttagtttttgttgaatatactttgtattctttctatattcttttattattgttagttactgaaaatgacacctttaaaaaatgtgtttaggtctgcatgaatttgattccttgaaggatcctgaagtaaatgaatttcgaagaaaaatgcgcaaattcagcgaggaaaaaatcctgtcacttgtgggattgtcttggatggactggctaaaacaaacatatccaccagagcatgaaccatccatccctgaaaacttagaagataaactttatgggggaaagctcatcgtagctgttcattttgaaaactgccaggtaggattatatttttttaagaaatattttgtaataaatttctcatttttacccgaatacaactgcatttttagaagtgtctgtcgcttgcctagcaaacactattagaaagaacaattttatatttcagatagaaatgtatttaggattatatataatagtctaaagtgatattctgtacacgtatctgttttgatacagtggaatggtgatttagaatgggattggcaaactggactgtttaattggtttttacagttttaaagggatgttaaaaagagaaaaaaacctcaaagatttgtaaagggatgtttaaaagaagaagaagtaaaaagaatatgcaacagagaccactgtgttgtatgttgtttgccaaacctggtcctttacagagaaagtttgccagttgctggtctagatagtgttccttattggaaatatttttttctcatgtgacttttctcccccatcggtagaaatgaaagcctaatcaaaatggtctctttgtttccatattcttaaatttgcattctgtgactatgtgaattaattaatgatatggaagtaggcattataatagagttgatatacagcccatccatttctgaatgttcatagcaattatacaaactagatgatgctactactgttgtatcaagtatagtggttctagcatctagggtctggcattagattaaggtagaaactcaaggatttttttttttttttttagacggagtcttgctctgttgcccaggctggagtgcgatggcgcaatcttggctccctgcaacctcagccccccagtctcaagcaattctcttgccgcagcttcctgagtagctggaattacaggcgcctgccatcacacctggctaatttttgtatttttagtagagatggrgtttcatcatgttggcaggctagtctcaaacttctgacctcagatgatccacccacctcagcttcccaaagtgctgggattacaagcatgagccactgcacacagccagatgttttgttttgttttgttcttgaattactgtgaataaccatagcaatgacaacaaccaattatgcagggtaagtgctcaatgacttaacagtcgttgttctgtgttgagcacttattctgcataattcctggtatggcttatttttcatatattctccagttcccacaccaaccttacaagygttgttgtctttcccccatcttacagtgaagagactgaaaggaagacaagtttagtgttttgtgccagtcctcatagctggtcagtggtagagccaggatttcatccaggtgtctctggttttacccagttttgcctccttttagacaacatgttaataagtatttgttaggacagatgtgaaaaaaagattctgccttcaggcattttctctaaacaagtaagtttatctagggaaaaacaccatttgtcattctgtcctgagatacgttgagtctaaagttcaatttaagtcaagatttgagtatcattaaaatgtcaaggtcaaatttacaatactgtttaaggaattctccgtggtcaagagaggtagaataggggaatttactgttgaaaggtgatgagagttcaacttgagaacactggctttaccaggtgaggtggcgcacagccactttgggaggctgaacagggaggatctcttgaacccaggagttcaagaccaggttgggcaacatggtgaaaccccatctgtacaaaaattacctgggcatggtggtgcacatctgtagtcccagctacccaggaggatgaggtgggaggattgcttgatcccagaaggcggagtttgcagcgagcccagattgcgccaccacacttcagcttgggcgacagagggataccttgtctcaaaaaaaaaaggtacaatatttcatgaagtcattgaaagtgataatgaacaactgcttgaaatatgggaaaactattaggatataagatcattggtgtcttactgggaggtgaggtcaaggaggaaagaggaggcatgcgacttctcaaaatgattcctagcatcctagcctgtgttctttgatgtgtgtgacactgtcttagtctgtttgggctgctgtaacagaataccatagactgggtggcttataaacaacagaaatttatttctcacaattgtagggttttttgtttgttytgttctgttttgttttgagacggagtttcactttgtcgtccaggctgcagtgcagtagcatgagctaggctcactgcaactgccccgtttcaggttcaagggattccctgactcagcttcctgagtagctgggactatagacaggcgccaccacgccatgctaattttttgtatttttagtagaggcagggtttcactgtgtttgccaggctggtcttgaactcctgagcttaagtgatccacccgctttggcctcccaaggtgctgggattacaggtgtgagccactgcacctggcctgtttctcacaattctggaagctgggaagtccaagatcaaggcaccagttcattccgtgtcttatgaggattgcttcctggtgcatacataactatcttcttgctatgtccttacgtagcagaagaggagaggaagctctctggggtctcttttattttttttttttttattttttgagatggagtctcactctgacaccaggctggagtgcagtggcacgatctcggctcactgcaacttccaactccctggttcagggattctcctgcctcagcctcccgagtagctgggactacaggcaggggccaccatgcctggctaattttttatatttttagtagaggcagggtttcaccgtgtttgccaggctggtcttgagctcctgagcttaagtgatccgcccgcctcggcctcccaagatgctgggattataggtgtgatccactgcacctggcctgtttctcagaattctgaaagctgggaagtactagatcaaggcactagttcattatgagggattgcttcctggtccatacgtacctgtcttcttgctatgtccttacatggcagaagaggagatgaagctctctggggtcttttttatttattttattttattttatttatttttttgagtcggagtctcgctctgtygccaggctggagtgcagtgacacaatctcagctcactacaacctccgactccctggttcaagtgattctcctgcctagcctcccaagtagctgggactacaggcatgcaccaccatgcccagctaatttttgtatttttagtagagacagggtttcaccatgttggccaggctggtcatgatctcctgacctcattatctgcccacctcggcctcccaaagtgctgggattacagatgtaagccagcgtgcrcggcctctggggtctcttttataaggacactaatcccattcatgaggactctgccctcatgacctaatcacatcccaaagttttcacttccaaatatcatcacattagagattaggtttctacatatgaattcgccaggggagacacaaacattcagtctatggcaggcaccaactcatagaaaacacagaagaacaagtaaaatactggaaaaaatagatgtgaaatagtaagtttagtttttaaaagtttgaatgtaagacatcttaaattcaggggagtgatttatttaaattaaattagtggaaaatattatggaattgatgtcaggtcagtatagagaatagcaataagttagttgttcagagtagcagttggttgctttgggagatagcttcttatatctttagtatatgatcatataatgaaaaattaccttgctagattatgagaggattcaggtgttaactgtatcattcagtcttatgatgaacagatttggtaatgctatatcgattccaaactatatcttcatttttaattgattagaatttctatatgtttctatttacatgtctctaaaattggacgtaattgctaattatggtttaattcgtataaagtatggctgtcttcttaccagtgagaaatgtgtaagtttttaaaaatatatatacaaaatatagctgcagtatgtggccgggcatggtggctcgtgcctgtaatcccagcactttgggaggctgaggcaggcggatcacaaggtcaggagtttgagactagcctggacaacatggtgaaaccctgtctctactaaagatacaaaaaattagccaggcgtggtggtgcacgcctgtaatcctagctcctcaggaggctgagacaggagaattgcttgaacctgggagacagaggttgcagtgagccaagatcgagccattgcgctccggcctgggggacagtgtgagactctgtctcaaaaaaaaaaagatgagatgttcattggaaaatgcctaatggtaacctttagttaaatattaatcttacctgtggaagctgtgcactatgaatacagtaagatgactttcaaattatcagaaatctttatctttcagtaaacttgtctacattctaaatatgcatccatataaaatttgttaaggatrtacccatataaatattatgtacatttgtacatattattacataatgattgtaatgtgatttttcagcataaatataacatttactgcttttttccccatctccctcccccttcaggaygtgtttagctttcaagtgtctcctaatatgaatcctatcaaagtaaatgaattggcaatccaaaaacgtttgactattcatgggaaggaagatgaagttagcccctatgattatgtgttgcaagtcagcgggagagtagaatatgtttttggtgatcatccactaattcagttccaggtatgtatattaactattaatttaccagaaaagtctatgagtatatatatatatatatatattttatttctgactttaaaaatgtgttcccacactggaacatttggaatatacagaaaattatacagtattaaatagtaaatattcataatagtacttacctctgagataatcattgttacccttttggcatgtttttgtcactttttgcagttatgtttgtattttagcataatgattgtacagacaaatatgtgtatgtatatgtttgtattctgctttgctttttttttttttttttttttttttttgaggcagagtgttgctctgtcgcctaggctggagtgcagtggcatgcagtcttggctcactgcaaccttcatctcccaggttcaagcaattcttgtgcctcagccacccgagtagytgggattacaggtgtgcgccaccatgcccagcttctttttgtatttttagtagagatggggtttcaccatcttggccaagctggtctcaaattcctggcctcaagtgatccgcccaacttgcttggcctttccaagtgctgagattacagccataagccactgtgcccggctcattcggctgttttgattgttttagttagccttataattattgtcttatatcattatgaatttttttaacacttatagctgctttctatttcatcatatagtataaacgtgaaatattctgggggaggtaaagtatttaaaaatcgattaaatggtcatccattgaattgtataaaaacttatttgtgattatccattagctaactaaaggaaaacttttcaattccagtctgaaatatttatgcgtggaatttcccttgccccttttttgttacttccatgaatggcaagaattttgcaggcattaggtttgaccattctcaaaagcctttattaatcattcgggtatttatttattttcatttaattaagaattctttgagaatatgcttctatacggcactgaattgccccagattatttttggagtaaagtggagtttaaatatgctatgtgcagtgcagcacccctctccctataaggtatactgtttaaagactaggtccttggctttgccttcargtaacttgaagatgtttttgttgaaatatcttggagactaaaaaatagtcattatgtaaggaatattattataagtgcccagttagaggttagtagttacagaattttaggaaagtcttgttattttgtgatattattgttgttgttgtttaaacaagaggggtataggcatgccaattataaagtaatatgtgtttgagaatatggagctgcaatttattagcagataacatgatgttacacctcttctcaggtttctggtgtggccctcaatttttgtggtttagtacatataaggtccaggagcagttataacttatgtgcacagctttgggagttgtggtattctgatagtaagctgttgaactctagtccataagaagaaacaagatgaaaaatgcttggtgggcaacatagaagtactgacttttcttcatgttctgccrtcattcaagtagatttctgtttctttaatttaacatttctttttaccttaagaggtgtaaaggagaatgtatattttaccagcattatcctctattattataaagaaaaacagaagcatgtatgtgtttttgtgcagggttagacaggagagaccctgtacaaaagagagagagagagagaatatacagtgtaggcaaaggaatgtgagagaaatggatctttcatagtgaaaagtttttggatgaatatatttatcataatatcatatataacttctgagagacattctggaagttttttttctctgacaaaaatgtatttttaatggttctgaattgaattacgatacattgaatcacactctggatctgtataggaaattcattcttctgaggaatacattggattcctattcactttgttaggaatctttggtaatatgaataatcaccccttttcttatatgcctctggagagtcattctagttttgtgaaaatagaacatcaaactgggatgatcggtaggtttttgatgggaagacggctggtaatacttgcctagarctctgtgatggaaaggggccatctcagggatccatagaaagtgtgaatctgccacatgcgaaccacgtattcagcttttctagccaagctgaaagtatggctgaagtatgactttagtgttagacaaatgggtttaaatctaggttttacagatactaggtgtgcaacttaacccttctgagtttcatttctttaatatgttaaatgagtgtaatgagattagctgtaacatacaataatcatctaactcatttctttaggtacttaggtgttcagttaatgatagctattttttgtattgtgatttaaaattctcatatgcttaggctgggcttggtggctcacacctgtaatcctagcactttgggaggtcaaggtaggcagatcacttcagctcaggagttcaagaccagcctgggtaacatggcaaaaccctgtctctacaaaaaatataaaaattggctgggcatggtggtgtgtgcctgtagtcccaggtactccagaggctgaggtgggaggattgctttagcccaggagattgaggctgcagtgagctgtgatcgtgtcactgcattccagcctgggcaacatagaccctgtctcaaaaaaaaaaaaaaaaaawtttttttttttaatttcttgatattctgctgtggtttaagacatactttcacagtgcatttgatatagtgttgttcagcttcattttattctattgatttaggtgttggcatgaaaatcaataccttcccctttcttgcccctatagtatatccggaactgtgtgatgaacagagccctgccccattttatacttgtggaatgctgcaagatcaagaaaatgtatgaacaagaaatgattgccatagaggctgccataaatcgaaattcatctaatcttcctcttccattaccaccaaagaaaacacgaattatttctgtaagttttatttctgaacctttagtaaccccaaaagccatgtgattgtgttagtttacataagtttcacacatatttcctttgctcacttctccttctgtgaaaaccaatacatatttgccaaaaatcgatcaccatttatttaaaaattatctttctagatactattatttttactcaagccacaattaaatgtaaatatgccgtttatatttttgatgtctttttctgccgaagaaaaatgccatcaaattagagattttgatttaaatataggacttcaatgagtaattggagacatcctagtagaaaagttagatgtgcagaaataattgaattaaccagtatatttcatttctatcagcttaactatggtagtatttttggtataatttgcctgccttcttaatactgaattcttttagtactaaacatatatgaagggcactattgtttttcagaatgtaatatatttgtataaagcaaattttaactttgtctttatttgaacagttaatactttttagtcagttactcagtcgtcacaaattgtatattgaactactccttgatgatgttatttctatattaatataaatggtcagctcttaatttatacaaagcttttattactatttgttaatgctttttaatttagtgaaatctcttagcattagtggaatgctgcctatgttttgccatgaaagccaagtgctaggggttataatgcttaattaattaattaattttttttttgagacagagtcttgctctgtcgcccaggctggagtgcagtggcgcaatcttggctcactgcaagctccgcctcccgggttcatgtcattctcctgcctcagcctcccaagtaactgggactacaggcgcccgccaccatgcccagctaattttttgtatttttagtagagacggggtttcaccgtgttagccaggatggtctcgatctcctgacctcatgatccacctgcctcagcctcccaaagtgctgggattacaggcgtgagccaccgcgcccggtcaatgcttaatttagtatatgtgactttcagttgttagtttagagctctattttcatagttttgccaatagacattagaactgatgacaattgcattgctagcatagaatattcatttctttcattaaaataatttgtatttattttattcttttacagcatgtttgggaaaataacaaccctttccaaattgtcttggttaagggaaataaacttaacacagaggaaactgtaaaagtgagtacccactaagatttgaatttgccatccgctccagtatttgaataactcactgatatgctcaataatgtcacattggagattgaattttacccatattgatcaattacatgatatagaatatggtaatttattataagactattgagaatttttgttttaaaattttaaaattttgttttaaaattcaaagacttttgaatcattagagatctactggaaagattgacattatttttccagtatatattacatatttcttctatatattatatagaagaaatatataatatagatgggtaagactgtgaagaaagttgagagaaataattcaaaggtgcaaagtagagttatcttggttgaataattctagagagctaatgtacaacccgaagactatagttaatgatattttatacaggaatttgctaggagagtagattttaggtactcttaccactccttactcaaaaaaaacaaaggtaactatatgtgatgatgaatatgttaaatttcagcaagtgaaagttaagccaaaactatagatctcatgtttttatgcaagcttactctcctctctcagccttgcctagagctgcactgaacccctctttcagtctttttttttttttttttttcttttctttccttttaaactgagcacagagaacatgtaataccatttcctggaagaaaatagattactacgttatggaccacaagttgttaacacatgggggtttattgctcaatcccatacatttaaataaagacttaacaaagcattttgtctcagagtataaagcatttattttccctaatttgctgggtaggaaattaagtgaatamtttttgtgatccaagaaagagatttggtttgtttgaaatgtttgttgcttgaagatatattcaggagccccttgccaaaaattaccaatgtcttgcttttgtacatgggtattaaagattttgggggagagtagaagggtggttaccgcctttggtgttagacaagtgggtgaggctgtgaaaaaagttgagagaaataatttgaaggtacaaagagttatcttggttgaataattctggagatctaatatacaacatgaagactatagttaataatattgtatacaggaaatttgctaggaaagtagattttaggtactcttaccgctcctcagaaaagaaaagtgtgtgtggtaatggatatgttgatttacttgactgtgtagcaagcacttcattctatattaaaacatcaatgttgtacaccttaaatatatgcaattttagaagaagattctttgagtagctatcattaaaataaaggctttgcttttatatcctcagctagatttttcttttttttttttgagatggagtctcactctgttgcccaggctagagcgcagtggcatgaactcggctcactgcaacctctgcctcccgggttcaagcaattcttctaccttagcctccccagtaactgggactacaggcacacgccaccacacctggctaatttttgtatttttagtagggatggggtttcaccatattggccaggctggtctcgaactcctgacctcgtgatccgcctgctgtggcctcccaaagtgctgggattacaagtgtgagccactgcgcccagcctagatttttctttttaatgagcatgtttatggccggttaacctctgttttctattttagtggtaatcctgtttttatcttttaatttaaattttttaattgcaaaagtataacaagactaattgttgcaacaaatgaaaaagtgcaaacaggctgggcgtggtagctcacacctgtaatcctagcactttgggaggccaaggcgggcagatcatttgagtccaggagttcaagaccagcctggggaacacggcgaaatcccatctctacaaaaaatacaaagcttagctgggtatggtggcatatgtctgtagtcccagctatgagggaggctgaggtgggaggatcgctggagcctgggaggtcgaggctgcccctgagctgagattgtgtcactgccttccaccccggtgacagagtgagacccaatctcccccaaaaaaaagaaaggaaaagaaaaagtgcaaacatgattaagaaaaaaggtactggtctctccttaccatcataagggattcaaagttaacaagctttgtgaatgtcctccaggtttataaaaatatatataaacatatgatatggaattaaaggggttttggttgtgtttatttctgtgatttgtcaaatggtttgttaataaagggatgatactatgtacattgttctataacttgatttattcactttataatatgtgctggacagtcctctggattagtaaatagtagacttccttgaggattttattctttttttaaaaaaattatttatttagagacagggtattactttgtcaccctcactagttgagtggcatgatcatagctcactgtaaccttgaactcctggtctcaagcgatcctcctacctcagcctcccaagtagctaggactacaggtatacaccatcacttccagctaatttttatttttatttctatttttatagagatagggtcttgctatgttgccaatgctggtcttgaactcctagcctcaagcagtcctcctgctttggcctctcaaagcactgggattacaggcacaagccaccatgccagaccagatttcatttttaaaggcaaaaatcacatggagtcaaatctacccacaagtcatatggaatattatatatatatatggttttgtttagtaatttataggtatcgatatagaatctacgtagtaacaaatgggaatttctgcttgttcttcccatttgcaggttatcatatttgtcttctgtagataatttatcagttctttgatttgtttatggttggtatttctctgcagccctttacttaatttcttcctaaagaatatccaagaagccttcattcgtgttttattttttctcaagcattatgcgttattcctttgtcagtggtcagaaacccaataaagtcattgacattttatgtccatatgttttgccacttctatcaggtatcaagcttgattgattctattgtttgccgttgttatgttcatggagaggattaatgggcttaatgacaggtagtatttaatgtatgtacctcaccccaccgtacctagcactgtagttctctttttctttcttctccccagcaggattatatagttgaatttgagtacattaaatgtaattatgacatgattttcctgtagatataccttgctacacaggtgaggagctccagtagaatgttaaagcaaaatctgaaaaaaggtggcagctttacatctttctttccaaacttttttctttcctgtatgcactggctaagaatcccagtacaatttcaaatagaagtgataagggtaaatggattactcagggttctccagagaaacagagccaataggatacaatatgtatagctatatctatattatcacatataaataagcaaaaaatatagaagatttattataagaaattgacttaaatgattatggaggtgggcaactggagacccaagagagccagtggttgagttccagtctgaatctgaaagcctgagaaccaggaatgccagtgggtgtagttcctatctgaaggctggtaggcttgactcaaacccaggaagagccaatgtttcagttagagtcccaaggcagggaaaaaagccaatgtcccagttacaaggcagtcaagcaggaagaattctgtcttacttggggagggtcagtctttgttctcttcaggtattcagctagttggatgaggctagcctacatcagggagggcaatctgctttacccagtctactgatcacaatgttaatcacatccaaaatcacccagaataatgtttgaccaaatatctcattagtaacacccagaaaaatgtttgaccaaataccagggtaccctgtgacctaatcaagttgacacataaaattaaccattatagtagaccttcttttttttttttttctgagagagtctcactctgtcacccaggctggagtgcagtggcgcaatctcacctcactgcaacctccgcctcccgggttcaagtgattctcatgcctcagtgtccggtgtagctggaattataggcacctgccaccacacccagctaatttttgtatttttagtagagacagggtttcgccatgttggccagcctggtctcaaactcctgacctcaggtgatccacccacctcagccttccaaaatgctgggattacagatgtgagctactatgcccagcctgccatcttgattttgttctttatcttaaaggacagcattcattaagtctttcaactttaaatataatgtagtttttttcatagatgccccttattcaagaaattctcttcctagtttgctgaaaatttttatcctttaagaaaaagttaatcactttttctgcattttttgagatgatttgtatattttaattcattggttttcttytttttttttttgagayggagtctcactctgccacccaggctggagtgcagtggctcaatctcggctcactgcaagctccccctcccgggttcatgccattctcctgcctcagcctcctgagtagctgggactataggcacccgccaccatgcctggctaatgttttgtattttttttagtagagacggggtttcaccatgttagccaggatggtctcgatctcctgacctcatgatccacccgcctcggcctcccaaagtgctgtgattacaggcgtgagccactgcgcctggcatccattggttttcaaaagttgaaaccaaccttacttttctgaaataatgttcactcggtcaagatgtgttagcctttttatacattattaaatttgacttattaatattttgttatggattttatggtctatgctcataaggaaaattgaggaatattggtgtgttcttgacttgtaatgtctttctttgattttggtattagaataacgttggycatataatgaggtgagaagccttctctattttctgaacaagtttacgttcagaaaataccagttggactggtattatttattgcttaaatatttaattgaacttactccatgccagctgagccttaagttttctttatgggaaggtttttaattagaaacttaatttatagccaggagtcgtggctcatgcctacattcccagaactttgggaggccgaggcgggtggatcacctgaggtcaggagttcgagaccagcctaaccaacaggccgaggcgggcggatctcgaggtcaggagatcgagaccatcctggctaacactgaaacctgggaggcggaggttgcagtgagctgaggtcacaccattgcactccagcctgggcagcaagagcgaaactccatctcaaaaaaacaaaacaaaacaaaacaaaaaaagaaagaaattcaaaatttatttaatgggtatggtagacagattttctgtttcttttgtgtcaattttggtaatttttgtctttcagagaatttgttttgttgttgtttattggcataaagttcatagtagtcccttatgttagttttctgttgctggataacaaaataccataaacttaaaacaacatttacttactagctcagcaatctaggtgtactttggctgcactcctttttgaaagctctgaaagagtctgcttctgaactgattcaagttgttggcccagttctgttccatgtgattgtaggcctgaagtctccaattccctgctggctgttggctggggtcttctctctgtaactagagacagctctcagatccttgccctgtggccctgtctaacttttaagtctggaaaatttctcacgcatcaaattttctcattctttgactcttttgctaggaagagctgagtgtcttttaagggttcaacaaataagtcagtctcactgaggattctctgccctccttaaagctgacagtatcatatagtataacctaatcacaggcgtctaatccatcgtatttgcagtctgagagatcatataggacacatgactctgtatgaggtctataacagaaatctcaaatgttcagtgttgactcaccactctgcctccctggcacttgaacatcttccatctctgtgggagtgcttggaattctgtagcatatagcttcctgatcaatctttccttggccttgtagggctttttgtttgttttttgtttttttaaagacagtcttgctccgtcacccaggttggagtggagtggataaacacggctcactgcagccttgacttcctgggttcaagataccctcctgcctcagactcctgtatatctgggactacaggcatgcaccaccacacccagctaattttttttttttttgactttttatagagacgagatttcactgtgttgtccaggttggccttgaactcctccgctcaagtgatccttctgcctcagcctcccaaagtgctgggatttcaggcatgagccaccgagcctggctagccttgtagtgttttcctctttcatgtgtacatcttaattaatattcagcagaagcctgaactcagtgttgcctaaagtctagaagatgacattatttatagctgtttatagctctagtgggaaaggggtcttctaactctcagagaatgtatgaattgtacctctttttctcctctttttgtttcttttttctcttctgcattgccccggtctctgaacagtattgtggcaatagcaacggtggtagcagtggcagtggcaggagaagcggggacaggcagagcctaagactcagagttgaatgtccgtttcaattataggagttgtagatacaagagaatggagtaagtctccccttccctcacccccctagtgtttagcatagttgcaggaagtgtgagtgaataaagccgcagctttctggttggataacaagtaaaggggaaccccagcctactaaaaaatacttggaacattgcagagtgagataagctcaggaaagcaacctcttaaagttatctgtgtttataagcttattcctgagctgtgcatatgaggatctgctcttaacagtctacatactttgagaactgaacagtggcatattccattagccaagtctcaaactggttaatgtgtagtgcacacatgggacagatgcaaatagccctgcaagaagacttgaaaactgaactggtatcggaactgtagctcacagaaggctcatggaaacttccaactgttgaacctaactaactatggtcccccaaaacaaaaatatcaacattctccataggatataaacaagacccaatgtctcataacataatagacaaaatatctggaatacaattcaaaattagttgacacataaagaatgaggaaaatctgaagttgtgtggacaatgatagttcaatagacgtcagtgacgagatgacacagatgttggaattatctcacaaagacattaaagcagttatgaaaatgctataacaactaagggcaaatcagcaggagggactggagagggagaaagtttcagccattaaatagaagatataaggaagaatcaaatggaaaattcagaactaaaaaatataataactgaaatttaaaaatacactgaatggacccaatagcagaatggtgatgaaaaaggaaaggatcagtgaacttaaagattaatcaatacaaattttccagtttgaacaacagagagaaaaatgggagaaaaattcgatagagccccaggaacctgtgagaaaatactagaaagtctaacatttgtgcaatctgactttgagaaaaataagagaaagagtacagttcaggaagactacttaaggaaataatcacaggaaactagattatyggcaaagtcagcaaaagacagaaacacaaattcaagaatcccaagagaaatacaagtgcagacatatcctgtatcacacgtattagtcatacatcataattccccatagcctagttatataggtctcaggactccttatctattaaagtatataacccaaggaacttgtatctttaatcttaaacattaaaaatatatatatttagggagtataaatgcatatttcttacatgcatatattgcatagaagtgaagtctgggcatatattgcatagaagtgaagtctgggcttttagtgtatttatcacccaaatactgaacactgcccaacaggtaaattttcaaacctcacacccacaccccctacccccacaccttccccgtattttcctctttttatcttctttcagtgcctggaacactgaataaatatttgtgcaatgaatgaatacattttaacgtaactgtctctaacattttatccttagttgaaggtcatgtagtattcttctcataagtcagaacaaagctacctttttacaaattgtgacataataaagaatatacatttggtctccgccgtggcttttggcacagagctccttaagtcccttgtcatttcctgagtgataggagcatctattattctaatggtttgatctagtctcagtgtcctgacaaaagagctttcaagacccatggaatctgggtaatgatagaagtgtctttttgtatgctgacaagatgaatggagacttacagtccctagatagctccaggatggagccggttgccagagaaaccaaccacgtgaatagaggattggaactttcagctccacaccgggacttctggagtggggagggaggacagagaccgacttaacagtggccaatgacttaataaccatacctacttaatggagcctcctccataaaaaccctaaataatgggatttgcaggacttctgggttagtgaatatatccacatgctgagaggatagtgcagccaaattctatggggacaagcttctgcacttggaacccttctggaccttgaagaacatatatataccttttcatttggctattcatttctatcctttgtaatatcctttataataaatgggtaaatgtgtttccctgagttttgtgagccrttagagcaaattgaacctgaggagggcatttgtgggaacccttgattgatcacaagtacaaataataacctgagatttgcaattgtcacctgaattggaagtcagtcttatggaactaatgccataacctggtagcatctgccctaagtccaggtagcatcaaaattgaattgtaggatacccaattggtgtccagagagttggagaattggttggtgtaggaaaaccctcacatttggtgtctgaagtgatgaaggtagaagagacagtttttcactttttacaaatgatcaaggctgggaaattcccaaaacatgggaatttccacctattcatgctactgatctttttttgtgtctaatatctaagggcaaaaatgtagtggattttggccatattgtggaacaagaaggaaattaaaatgttgatgtgaaaaaaattcatatcttattcaacacagaacatttttaattggtgagtataggaatgcagtctgtgtgttggcttggcacctccctgctatagcacagtggcaagtcctttgcatgtcaaagcctgacttcttttgctctcctaatgttctggggcttgtgaagaagtgtttccatgaaaatttattaaagttggataataaaacatgtaaccgtataaagcatgattattatttttatttttgagacggggtctcgctctgtcacccaggctggagtgcagtgacacgtcttggctcaccacaggctctggccccaaggctcaagggatccttccacctcagcctcctgagtagctgggatcataggcccacaccaccacgcccggctattttttgtattttgagtagagaggagagttcgccatgttgcccaggctggtctcgaactcctgagctcaagcgatctgcccacctcgacctcccaaagtgttgcgattacaggcgtgagccactgtgccaggttttaaatcatactttaaataaattatactttaaaatgctttacttctcaagattgaagataacccagatcaaacttcaggaaatgggacaatttttataaaatttcatgtgatacaaatttagaggatggattttgttactgctttttctgaaaacaaaaacttctttttttatgcttcttttytttttawtgggagattctaaattcagagaacaaaatttttagcatcattataaagttgggtcttttttcctactcttgtttctttttaacgatttgtcaactttaataattatggtaaattacacagagatttctcaagcagaactaatcttaatgacttggcctgaaataaatcatactttgactgttaaataatgatacttattttcaacaaattttttcagaatgttcagggtcttgttttttttaaattgtcaccatgctcaagttagattaattctttattgttattcttttcaagatcacattttttgttgtggctgttcacacagatggtacgggacttttttttagcccattataattcagggttttttgggttttttttttttgagcttttatagcagctcatccctaattctacttcatttcctatacctgagttttgccagaagtttttggatgcagttataactagcattctgttttgttttgtttttaaatactagcraacatttattgagcctttattatatggtgggaacttatttgtctttatttctcaatgtctttatcaccagaacactgaaaaataatcatttgtaaaattcataattttctgcataaactatatttaaatgccatattaaaaaggtgacaaattcaggtaagattatcgagagtaagaattgaataccacttttatcctgatattcctatcttataacctcccatacaacagatgcaaaatatattttatgtatgttttgttttatttatgatttaccaaatctcattttacagattatttgaggtgagcctacacacgtgtgtgtgtgtgtgtgtgtgtgtgtgtctcttacatagcacatacaatacagacagttttgactttaaaaaaaatagaggatagttaattgacaggaaataagaaaaaaaaaaaaaacacccagtagcaagattcctagtaggtatgtgtataatattaratcctgtgtgatwaattttttgatgtgggctacatatttgactgtctgcttgccctacacctagtggacaaggcaaagagaaaacatgatcagttataatattcagaatctcataaggtaaaacaaactagttatttatgagtttgtagcatatttcaatactgtaaattgagagagatatgcttagggaatccttatgaatgagacacagtgagtaatgtagtgagcaccaacacctctgacaacatcatattatagtaggcaaaataatgcttctcatctctcttataatgtctttcactaggtagacataaaatacaatattgacagtataatctggaaaaagtcattctagaagagaccaaattaattcagtcttagtactgtattcacccatttgatggtttatctttaattgaataatatttggacttcctaaataaatgttgtgtgtttttcaggaaattctgtatgcatatttttattcaaaactggatttgggaaagattaggcagtggagactttgttgtgttcatttaaagtcaaataagatcaaagtgtatatacatatatatgcacacatggatcatcaactgagcctagagtaacattaaatcatcttggccatgcccagtggctcatgcctgtaatcccagcagtttgggaggcccagacaagtggaacacctgaggtcaggagttagagaccggcatgaccaacatggtgaaacctcatctctaataaaaatacaaaaaaattagccaggtgtggtggcaggtgcttataatcccagctactcgggaggctgaggcaggagaattgcttgaacccagaaggcggatgttgcagtgagccgagatcatgccattgcactccagcgtgggcaatgagagcaaaactctgtctcaaaaaaaaaaaacttaaggatatgaagtttctaagcagaaatcatgtgtgaatagatggcactgccctctcccccactcacctttcatgaagataygtggagtgttagttgactatgaaatcactttcattttcccaaaaagtagcttaaacagggctttgaagtttttttgtagtttgcaggcttattatctctctggagagtaaatggtaatagaaattttgagcagtaaaaggtaagaaatcttacagtaacaaaatagttttttctttattttctttctttcctttcttttcttttttctttctgaatgaggcagggtcttgctctgtcacccaggctggcatgcagtggcacaatctctgctcactgcaacctatgcctctagggctcaggcgatcctcccacgtcagcctcctgagtagctgtgactacaggtgcacgccaccacacctgactaatttttgtatttttttgtagagatgggcttttgccatgttgcccaggctggtcttgaactcctgcrctcaagggatctgcctgccttggcttcccaaagtgctgggattacaggtgtaagccacctcacccagcctgaaatagtaattttacatttgaaaacagtcagtcatggtgctggtctgcctgaaaacatttgggatggagaggaggcaggtgattaggtttatccaagatacagacttccagacgagtgtgatgggagagaggcacttgcagataattttggtgagagtgaaggcagacaaaactattagagaagtggggagaaagaggtgttggttgttgaaatagaggtcttagtgatggctacaaagttttcctttgggaatgtattaacagtaagttggaatcagggtgggaagtggttggaaactgagatgtaataattagtgatttggaggtgctagggtgtggtgaagtcaaattcagggtggcatcrtgagattgtgtggctgaagggaaggagagaagtacctagttggagatatttaggtcaaggaactcaggagtcagatgggttgtttgcctcaggcatgcggaccctgcatcaatacctgttagtgattttcttctcacttagtcgtcttcacatcttggaaagcaattaytggtatctttcttgtcagaaacttgaaaaagtacaccactttgcttgattcccaagctttttttttctagcctagctatttcttcaggtctcattttctattttcacactgtacatacacatttcttcccctacccccctttttttttgtcagtgtttgcagagcagattgggagtttatatgaatttagtttaaatgaatggaatttaggttaaatgttgagtatataatatcatacagaatttttggtaatgtgtttaaagctatgaaattgattatttcttcagccttgaaagacttctctggagatgatacagagctgatacagacattgatgatggggctgtttcttaattgctcaggagaaaataattgttgtatggttcttacaggcaactaaacttttatttagagaaacaaagtaattgggaatatgagaagtgaaatgtgtcttaatatgccttcacttattcctattctttctagtgttctattttagctgtttaaaataccacgctagaccggtgttaaaggctcatacctttgggagccaaggtgggcagatcacttgagctcaggagtttgagaccagcctggacaacttggcgaaaccctgtctttactaaaaatacaaaaattagccaggcatggtggtgcgcacctgtaatcccagctacttgggaggctgaagtgggaggatcacttgaacccgggagatggatgttgcagttagttgagatcatgccactgcactgcagcctgggtgacagagtgagacctcatctcaaaaaaaaaaaaaaaaaaaaaaaaaatactgagctaatgtaagtttctgataagttagatactttgtttatagcatataaggtagatataaagattttctaaaagtgctgttgtgtaaatctttcttcataattttctttagttcatagtctttagaaactaaaaatgaaagtgcccaggctttttgactaatttctgggaacacagggaaataccatttaaagtagttcagagacatggacttaaagaaagattgcttaagggtgtgactacttaatcctgaaactgcctgcttaaagagagggagaaaaacccaaatggttgttttaaaaaatcatatctaatacaaaaataggcatatagaccaatggaacagaataaagagcccagaaataaggctgcacacctacgaccatctgatcttcagcaaagttgacaaaaacaagcagtggggaaaagactccctattcaataaatggtgctgggataactggcaagccgtatgtagatgattgaagctggactccttccttacaccataaacaaaagtcaactcaaggtggattaaagacttaatgtaaatgtacacttatatttactttacatgtaaaacctcaaactataaaaaccctggaagacaacctaggcaataccatcctgcacttaggaatgggcaaaaattttatgacaaagacaccaaaagcgatcacaacaaaagcaaaaattgacaagtgggatttaactaaacgtaagagcttctgcagagccaaagaacctatcaacagagtaaacagcctacagaatgggagaaaatatttgcaaactatgcatcagacaaagatctattagccagtatctataaggaatttaaacaaatttataagaaaaaaaacattaaaagtgggcaaatgacatgaacagacacttttcaaaagaagacatacatgcggccaacaagcatatgcaaaaaagcttaatgtcactgatcattagagaaatgcaaatcaaaaccacaatgagataccatctcacaccagtcgsaatggctattgttaaaaagtcaaaaaataagagatgctggtgaggttgtggagaacacatacacactgctggtgggagtgtaaattagttcaaccattgtaaaaagcagtatggcgattccttaaaaaactaaaagcagaactaccatttgacccatcaatcctattactgggtatatacccagaggaatagaaatcattctagcataaagacacatgcatgcgaatgttcattgcagcactattcacaattgcaaagatgtggaattaacctaaatgcccatcagtgacagattggataaagaaaatgtggtacatgatcaccatggagtactgtgcagccataaaaaagaatgagatcatgtctttagggaacatgggtggagctggaggctattatccttagcaaacttatgcagaaatagaaaaccaaatgccgcatgttctcacttataaggaagctaaaygataagaacttatgaacacaaagaaggaagcaacagacactggagcctacttgagggtgaagcggggaggagggagaagagcagaaaaggtaactgttgggtactaggcttaatgcctagatgatgaaataatctatacaacaaacccctgtgacaacagcttacctatgtaacgaaccttcacatgtacccccaaacctaaaatgaaagtttaaaaaaaaaaccacaaaaaatttctattttcattcatggtttcatttaatgagttttggattgactgtggtcattttgctgttatgtctgtatatagggtcttacatttggacattcagccattttataatactttctgggctatttaaaaatatttaaaggtaacattatataaaataaaatcaaagatcattgattttaatatttgtccccctttaatcagaggagacaacaatcaccaatattccagctatccactataaactacttcttttttttttttttttttgagacagcgtctcactctgttgcccagrctggagtgcagtggcacaatcttggctcactgcaacctctgcctcctgggttcaagcaattctcctgtctcagcctcctgagtagctgggactgcaggcgtgtgccaccgtgcccagctaatttttgtatttttagtagagaccgagttttaccatgttggccaggatggtcttgatctcttgacctcatgatccgcctgcctcrgcctcccaaagtgctgggattacaggcatgagccaccgtgcccagcctgtaaactacttttatttgtattcttcacacagtttacaaggtgaacatgctttttttttttttttttttttttttttttgagacacaatctttctctgtcacccaggctggagtgtagtggttcagtcttggctcactgcaacccgcctcctgggttcaagtgattcttctgcctcagcctcctgagtagctgggattacaggtgctctccaccacacccagctaatttttgtatttttagtagagatggtgttccaccatgttggccaggctggtcttgaactcttgacctcaagtgatccacccacctcagcctcccaaaatgctgggattacaggcgtgagacactgcacctggctgtgcttttgataatattttgctatagtatagtattttgatggtatgttgcgttatactgtttttcatttaaggttacatcataaatcaactttttctttgtatacagcatagacttcatgatgaattgaaagtaggagacagaggtgactgagtagctgctggtaccattgtcactgtggtagaaagaacatgtgtgattatggttagtcagcttctaaggtagatttttgtttgagtttgatctgagagagacttgcacaggtttatagcctgctggaggaagatttttccaatgcrgaggagcaaaggagtaacatctcagtacttggggagctggagcaatatgggaccaggggacttgaaggattacgcctttttctggagttgaagggaattaggtcatgtgttcagatataaattcctagtgacctgaggatttactgcaactacttttagtatcctttgtaacacctgttacttgaatatttatcatgttataataatccatctgtgtttagaataaccaatttttttcttttagcttaattttttttcaaaagaaaagtttcaaatatacacaaaagtagaatagtataatgaacctccatgaacccatcatccagattcaaaagttattctgatagctttttaataatatttctttagcttttaatcatttaaaaatatttaattctctaatccatctgtgttcatttagctggaattagataaaagaatattatttattaagtcagtcatcttttttttactatattatgatatgtctggcctactaacctacagttttatttatgccagcataacatagttttaactattttagtaggttttaaactcataattatattataaatatttataattaaaattgctgattacatcagtatttaaaattttatattactgtttgaatatattttaatatctatagatgaagtatgtgtatattcttgggtatttatcttccttttcaaatattggcgtggtaactcttaactagctagaaaagcttttgctgataagcttttgaaaaatgaaagataagcctaaacaattccacatatgtattcatttgtttagtaaatatttgttgagtaatattgtgtgctagtatcacatctgaataaactggtataaaaactttgaccttaaaagtgtatcactgggtcaatctctgtgttttactactgtttttagctctactttctccctgagttttaaattggtgataattaggtcacatattttaaaaaactgcaaatgagtaaaattgtctgggacatcttacgcatgccctgcatcactctggccccaggcctttagggaaaaacaaaggaccgtgatatataggataatcaagatatggatggaatatcttttgttagctcttgacttagtatgacaaattcataaattatttagaagtagaaagaaactttggagccatctcatccattcattctttcctacacatagagaagggtaagacaagacctcaagtaaatgaagtcagtgagtaagcatatgatagtatgcttatacttactgtcacggtttctttagacctgtttaaaccattgagcaccctggcatttggaccaatatgtgattttatagctggtttacttagcaagtgaaaaacagattagactaactacggtttactgaacgatatactggttaattacactctagtggttctgcagacaagtaggctttctaaaacttggcatgtttcttcttccagtatgttccttccttctccaaaataaagatgtttttagtgtagaaacaaacaaacaaacaawaagagatgtttttcgtggtacagtattcatgactttgtttttgtttttgtctgcttcrttacaggttcatgtcagggctggtctttttcatggtactgagctcctgtgtaaaaccatcgtaagctcagaggtatcagggaaaaatgatcatatttggaatgaaccactggaatttgatattaatatttgtgacttaccaagaatggctcgattatgttttgctgtttatgcagttttggataaagtaaaaacgaagaaatcaacgaaaactattaatccctctaaatatcagaccatcaggaaagctggaaaagtggtaatgatataccaacttctgaggattgttttatataacggaataattttaagactgtttgaaataattgagtaatataagttaaattatattaggtaactttgatccttaaaaactgattttaagaagataagaaatttccatgtttatatctttagatttatgttcatgcatttatttatgtttatgttcatgcattttttttgtaatcttgctccttctaccatggattttcttttggcaggtttattttataagtgttttattatatatgtaatacttttaagaagatatgaagaatgatgatgtttgaaaaatttacagttctgcagtctttcaactgaaatttcatgtgacagatatgtttaagaattcagaattttgtgtattttagaaagatcattggtcgtaactgactcaacatatcttgtggggtctggggcataaatgtgtcatcaaacatgttaatatttggagtgaaatatatcagtattcacactaaatgtgactatcattagctttttgttatctctggccactttttgctgtcacatgagctatgaacaaaccttcagtttttagagcttctcggattttgaaattatgaatataagaggatggacctgttgtcatactttcatcttccatgttatgttttcagtcaaatgtttcactttcttcttgctttttgaaagctttttggtggggatagggacattaattttatatgtttttaaaatctagttactatatttatctatatattaatttgtgttattttattctttttttcttttgagacagagtctcacactgtcacctgggatggagtgcaatggcacgatctcggctcactgcaacttccgcctcccgggatcaagcgattctcctgcctcagcctcctgagtaaatgggrttacaggcacccgttaccacactcagctaattttttgtatttttagtagaaacaggatttcaccatgttggccaggctggtcttgaacccctgaccttgtgattcacccgcctcggcctcccaaagtgctgggattacaggcgtggccaccgtgcctggccgtgttcttttattcttaacttgggaatataagcatctcctctggttatcatcatatagtcttctaaaaataatttttaggctaggcgcagtggcccacgcctgtaatcccaacactttgggaggctgaggtgggagaattgcttgaggacaggagttggagaccaatcttggcaacatggtgagatcctgtctccaaaaaaaaaaaaataccctaaaagtaaaataacttttaatgactaaaaagtcacagaagcattagttccttagtatttttttcttccttaatatagaattatcctcaaagtgtttgattataagatttttgatacactatggtgaaattaatctatttaaatgtttgtataaaagtcctatcagctcaatgcctcctttttagagatatatttatatgcctagagacattatctccttccatattgagatttatgtaggttgaaagctcttaaaacaagtattctgatattatacgtgttttcttggattattaaagatttctcattttggctgggcgtgatggctcacacctgtaattccaacactttaagaggcttaggtaggtggatcacctgaggtcaggagtttgagaccagcctgtcctacacggcaaaaccccgtctccactaaaaggacaaaaattagctgggtgtggtggcgggtgcctgtaattccagctactcaggaggctgaggcaggagagtctcttgaacctgggaggtggaggttgcagtgagccgagatcacaccaccactccagcctgggtgacagagtgggactccatctcaaaaaaaaaaaaaaaaatcattttcacaaggctttttagtccatattctattttattcatatactatttattatgaaatgttaattgagttttaaggttcttcttaaacgtaataaagatagtgagcatttttctatgtatatcttgttctcattttagaagattattttggaaatcatccagaactttctagaactaacattattgaaacaaaggacatgtgcatgtttacaccttaaagttattcttagcatatttatgcaatggtatctttttcaacagcattatcctgtagcgtgggtaaatacgatggtttttgactttaaaggacaattgagaactggagacataatattacacagctggtcttcatttcctggtaagatttacattcttatccttagtgttaaagcataactaacttttggcatgtggactaggtaatatttatgaatcaccgttctttcaatttaataaataaaattatcattttgtattatttattctaaaatagatttacacaaattattttaatattatcataaaattacttgtttctgagtagatttctttacaaattttgttttggtttaaaatcggcctatattttattttattatttattatttttttttattttgtcgagacaaggtctcgctatactgccaaggctggtctcaaaactcctggcctcaagtgatcctcccaaagtgctaggattacaggcatgagccactgttactgacctgtattttaaacggttattttaacaagttagtattttaaacatacttccaacaaataatgtaccattattttgctagtaacaagttaactctagtattaacaaattattcatttagctcattagagattgtctagtctcgctatgggacataacttttaagttttgtgatgggtagctttgtctttaaatcttatgcatctccataccatatttaggaatgaaatagactaaacttctttttttttttttttttttttgcgacggagtttcgctcttgttgcccaggctggagtgccatggtgtgatcttggctcactgcaacctctgcctcccaggttcaagcgattctcctgcctcagcctccctgctagctgggattacaggcatgtgccaccacgtccagctaattttgtatttttagtagagacagggtttctccatgttggtcaggctggtctggaactcccgacctcaggtgatccgcccacctcggccatcccaaagtgctgggattacaggcgtgagccaccgcgcctggccgtatttctgaatatatttcttattttaatgaatgtgtgttgctttcagcattttttgtaggtttttttttctttttttttttgagaaattctcctaaggaacagtgtcttctttataataacctttgttgctcctaattgtgctaactttcttcatgagtagaaggaacatctctaattagggagaaatagtaaaaacacttttttttttttgagatggagtctcgctctgtcacctcggctggagtgcagtggtgtgatatgcgctcacttcaagctccacctcctgggttcatgccattctcctgcctcagcctccccagtagctgggactacaggtgtccaccaccacacctggctaattttttgtatttttaatagagacggggtttcacagtgttagccaggatcgtctcgatctcctgacctcgtgatccacccacctcagcctcccagagtgctgggattacaggcgtgagccaccactcccagcctaaaacactttttctttagttggctttagcctgaaatttgaggtaaatggagcaccttccacacgcttttatttctcaaatactactcaaaataccctcatcaagtgaggtagatggttttatttccatttttacagataagtgaagctcagagaaaataagttagtcttacatagctgtttcaaacctaggatttgaatgaaagactattcaaatcttcccattggtctatactgctttcccaaatgttggaatttttagtgtaaatcttgcattataatagtggttttctttttcttttttcctgtctttatagtttgttgatatatctagtgaagttgtaaactaatttgaatttgaattttttaattcatggctttgtaagtgacatttcaaaatgttcatgtactagcagttgtcacctgaaaaattacttttggataatcatttactgacatatctataaactctttgcaatctaatagtgtgtgtgtgtgtgtccttctattcctatcctctccagcatgtacctctaacagttttcactaattatgttattccccaaatgtaggagaactgtgtatatttgacgtatttctttttgtttgtttgtttgtttgactcagggcctcaccctgtcacccaggctggagtgtagtgacttgaacacagctcactgtagccttgccctcctgggctcagcctccctcctcagccccccaagtagctggtactataggcatacgccaccacacccggcttttttttttttttttttgtattttttgtagagacagggtttcgccatgttgcccaagctggtctcgaactcctgggctcaagtgattttcacctcctcagcctcccaaagtgctaggattataggcatgagccacagctcccagcctatttgacatatttcttaggaggaactaaactttcacaatacaataaaatatagcagcaaaatactgtactttcttgagaatcttaatttagactcacacatgttctccagaatcaccaaccaacttgactagtatttttagtaaaaattacaatttttggtggtgttaacttggcataatactatgaacctgacttcctctctgagaaaatgtatgataaaaartaataaatgaacacattagttctgcatgtgtcagctctagaattgttacatttaacccagtaggggcaaacaagaagcaaagaaactacaaataatctaccatccagagtccctaggtcatcattacaaggtatacaatcacgtttattattttttttcctaactttccataatttttttatgtggactaggaaatacaaatgtcgattcctgtttttccccctatacttacacaaaatgacacattctgtgtaatgttctgcttcttgctttattcaccatatctacatatctacatatcaccatatcttctctacgtatctatgtagagaactgtttttccccccatgcctggactgttagatttttttttttaagcagaattgtgttctgatagttcaaacagtgctgctataatgaataaccatgcttatgtacagtgtatatctgagataaattccttagaggtgggtttattgattcaaagaatagataaatttataattcttatmattacaaattgttcctcaatagcgtgtatcaatttttgctctccatgtgtagtatatatgaatgccttttttttttgccacatatggtggttcacatgtataatcccaatgctttgggagactgaggcaggaggatcacttgagtccaggagattgagaccagcctggacaacatagtgagactctgtctccctatacacacagaaaaagagtgcctttttttctgatcacttttgaacaaggctaaaggattacctctatgtatggggctaataagtactaaaatactaaatttgatttcagttaggttgcatttgataggacaaaagtaaaatagtactagagagcagaagtatgaaactgtaaattgctgagaaatcagctctagagttgtataaattattagaattgagccaggtgcagtggtgtgtgtgtgcctgtagtcccagttactcaggtgcttgaggcaggaggatcgtttggggctaggagtttgtatccagcctgggcaatgtggcaagacccygtctctaaaaaaacaggaagattaaaaaaaaaaaaaaagagttgcctccatccaggtgaaaattgagtttgggctgggtgtgattgctcacacctgtaattccagcacttttggaggctgagttgggtggatctcttgagctcaggagttcaagaccagcctgggtaacatggtgaaaccctgtctctaccaaaaattaaaaaattagctgggcatggtggcatgcgcctgtggtcccagctactcaggaggctaaggtgggaggatcacttgagcctgggaggtggaggttgcagtgagccaagatcatgccactgcaccccaacctgggtgacagaraccctgtctcaaaaaaaaaaaaaaaaaagaaaaagaaaaaattgagtccgtgaggtgagaaaatatttaaaaagatgaacgaagaattaaggaacgaaaacttgtaaagattttccagctttaggaaataattctgagtgtgcatactttatggacattagacctaattagagtagagctgatattttttttccttaggagatacagaaagaacaactgtactacagtcagtataagaaaagaaaaattactttggagagagaggatcttagattgtacacctaactctattttctcatcatgagtttcttatctgtgaaataaaaaaattatatratgcgaactccagagttttctaactacactgaaattctaaaatcacacacacagttctgtgaattgaccatatttagcgtggtggaaaaggaaaaggaaggagtaccttgaagaaagaagcagttggtgaggtaaaaggagcgccacttaatggagtattccagaggctaccagagaaggtattttctgtcagcagttgcaggataataaagagcattatcgttagatttgataagaagaatgtcattgatgacttaaaataccaatttggttattgtgacaaccatgaaaaccagattacatgtgattaagaagtccatatgtagtgatgagattatagtttctatgggccacctaattttgatggagrgagagcagttccaattaaagtcttttcaagattgagaactaaatttgaattaagaggtaaagtagtcattcagttttgttaactttctcatttttaaaacatgtatgcaaactcacactgaaattttgttccaagcattaacagaaaattagaggattactgatagaattgtctgtcacacttctgtagttgacatacttctaaggtgattttcatgggaggagatccattacagcttttttaaagcctagttttaaagacattttttaagaaccaaaattatttgcatgttttagatgaactcgaagaaatgttgaatccaatgggaactgktcaaacaaatccatatactgaaaatgcaacagctttgcatgttaaatttccagagaataaaaaacaaccttattattaccctcccttcgataaggtaagctaattatttaaaggacctctatgcatgaaatgattgaatgatcagttcctctrtgtatagtttaagctctatctgtctctttcaaaacttcccatacagtgacagctttgttgagtgggaagaccatggatcagggagccttcttaactctgttagttttggttttatcactgactaagtaagaaaaggtacctccaggccgggcgcagtggttcacgcctgtaatcccagcactttgggagcccgaggtgggtggatcacctgaggtcgggagttcgagaccagcctgacaaacatggagaagccctgtctctactaaaaatacaaaattagctggrcatggtggcacatgcctgtaatcccagctactcgggaggctgagcaggagaattgcttgaacccgggaggcggaggttgcagtgagccaagatcgtgccattgcactccagcctgggcaacaaaagcaaaactccgtctcaaaaaaaagagagagagaaaaggcatctctggagttcacttttcttatttataaaatgaagaaatcataattgttctattttttaatatctcacgcccttaaagggctataaatatattcatatgtaactgaatacataaaatgttgtttcaaatattaaaggtatagtcactgctgtattagaattgatactcaaagaacaattgatttttgttgaatatgtctgttagtggcgcttcctaatgtagttattttatagaatctatagtaaggacttcatttctaaatatatttctttaatatacacactgcatgtcttggggataaagagattatctaatgggggctaaatatagggctatggtaatttacatgctaagagagctgagctgtcatatattttatctttaggtttggcatggtgttttttattttaaaaaatggagtatttctctgtcatccaggctggagtgcagtggcacaattattgagcctcaaattacttgcctcaagcaactgtcctgcctcagcatccctggtactgggattacaagtgagagccactgcacctggtagtgttgatttttataaggaaatctttgaacaaattctcagaatttaggagccaggcaccatggctcaagcctgtgatcccatcarcttgggagtctgaaccaggaggataacttgaggctaggagttcaagatagcctggacaacatagagagacccttgtctgtacaaaaatttaaaagttagctgggtgtggtggcatgtgcctatagtcctagctactctggagactgaggtaggaggactactttagcccaggaatttcagactgcagtgacctatggtcatgccactgtgctccagcctgggcaacagagagagaccctgtctctggagaaaaaaaaatgttcagaaaataagctgaaagtttatttaatttcctcaatccgcttgagtacaaactacctttgaagattgatattatactttataaatacttaagataatctacctgtacatttaaagtattagcaaattaaatttatgtaattcactctttcttcattttcattataattggattttatccatctaaggagtaattttttatttcaagttttttaaacatgtttttytgaacaataatttacaaccaaattaaattttgtgcttataatataaatttcaaatatggcaagaatcatatacgttagtatacactgagtagaaaaagctacattttgactcatccaatacgtttatgtagtgtctttagttattcctttgrtagaaatttatccataagccatagctactcgtgatatatttaatagttttagctgtgrctattatcatgttcagttatgatgtgtgttcaacagttataggctcttttggctcaaatgaaatgctttttgaagtacttttacaaatatagcctcctatatttgcaaatataagtttttttttttttttttttttttkttttttktttttttttttgcctttctaatctcttggagagtctttcttgaagaagatcagtttgggatagagattttagtctttgaatatatataagccagggacagcagcctttagtcccatctgcttgaggctgaggtgggataattgcctgagcccaggagttcaaggcgagcttgggcaacatagaccccatctcaaaaacaaacaaaaagtatgtaaataagtatatgcttattgatctccttcaattgtacaagttagatattgtcgttacttctacttttggtgtctgttaattgaagaaaaaacataatgagaaaagtttattctacaatttagtaactcttacatgtttttgtgtcttcttaactagaatacatttacttatacttaaaagaaaatttttgacatatatatgctagctggtacttgttttatctccagacaattttagtgcttcctaggagtcataatcccttatagcaataccatcatttccctgttgtcaagagtttaaagcacttgagaagcatcattttgcttttaaaattcatgtttctgttacaaagcatagcaatgccagatcttatgtagtctaagtacaaatgtagtcatttacacttaaaattctacaaatatgrgagccaaaattcattttctttaatttttttaaacagattattgaaaaggcagctgagattgcaagcagtgatagtgctaatgtgtcagtaagtatcaagagttttaaatggccctttcttatggagttgtgcacattattaggtatctttgcctcatagtaatgaactcacagaagaccgtaactcatatgcaagaacagtctgtgagtgtgggtaagtatgcacatgatagtgttttgttaaatggcagcccaatttgtgggtgatctgggttcagtgggcaagcccttttctgatacaagtacaggtttagcaggtaatctataagggattctgtggcacctcatagattaacaatgctgtcatagtgaatattatttagtttaatgaggagactgtatttctctcaggtaacaaagcagatttagtaataggcacacacatcatcatgcaagtgacccaaatttcttccatcttagtgctctgccatatttaacatgtattttctatttcatggtttaatattactgcttcagcttcctactttactatattccagccagcaggaacaggaaaaacaatagtagtggtcacaccccattcttattcaggatatcattagtatgtatcatttctgcttacatgtcattggccagatcttactgaccatgcctaagtacacacgcatctgagaggtgcagtctttagccacgccatcagtcatgcgcttggctaagagtaagagattctagtactaaaggaagaagtggagaatggatattgagggtcaaatagtagtctctgccacatatactattcccatttgtttctatgcagatactacaaataggttactttgttgacttgggttgctatatttrtatctatatctacatctatatatctatatctatatctacatttatatatctatatctatatctacatatctatatctatatctacatatatatatataaatatgtataccatctgtgcttttttatttaattttttggctctttctagtttgactttgttgagctgtaatccagtattctcgtcatcagtttacaacttttaagtctatttagcaaagtcattctacctgtagcatggcagtgttatagagactaggaggcaaactggagacaatgtgtatgtttttcccattctcacagaatcaaagcactatttaattttggccagttggtgaaatgtctggcctaggctgtcttctcctttgccattagagctctcagaatctttccctagtttctcagtgtgagtcatctgctactgctttcttattagtgtttttggcttaaattttgtcttttgaatttgaatgcttgaccttaggaaagagagcagtagtgccagactcctagtctttacagtttacgaaaggctctgggccagtttgggaccataatagccaaattcttcctctctctgtcttttttcccaaagttttgtgttattcaggtttctggagacagtttcagataataatttaatttgtaaacattgtgcaaattttaatagcttaaattatatatatggcctgaaaaaaatttgcatgatcaattgatgaggctggtgtgataggatccttgtgtttgactgctttttcttgctgaggatgtagacttgagaatggcctggaatctctaagaagtaagagtttattgaaaaagtaaaacagtaaaataaaagtggaagcaatctcagagactagtgtaaaaaaatgtgtgtttgtgtataaatttaaaaaataaaagaaaaactttaaaaagagacaactgcaagagcagttacctttaatgatacaaaacaaatttcttacaggtgttaatttatcagcttattaggcaattactgaaacagataattacagtttaagcttaggagatatagttacacaggcaggtcttggttcaagtgcctgtctcattaccctttataagacaatattgctccttgaacctcagataaatgaattagtttttactatttccaccataaacttgtacctgacctaaatcagagagtttgctacacactgagcatgcagtaatcttgcccaggtctgatatacctttacaatttgtttgttttttattaggcacaaagtacaattaataaatggtaaggatgggtgtgatggctcacccctataatcgcagcactttgagaggccaaggtaggaggattgcttgaacccaggaatttgagagcagcctgggccatacagagagaccccatctctacaaaaaaaaaaaaaagtattaactgggcgtggtggcatggacctgtagtcccagctacttgggaggctgaggtgggaggatagcttgagcctgggaagttgaggctgttatgacagagtaagaccctgtatctttaaaaaaaaaaaaaaaattgtaaaccaaaaatgaaagtttctctctgtgactcccacctaccttcctctccagagctaattgtaaacagtttaatttgtagctatcaatcctaactttatatgtaaatatctccccctttaaaataaatgagatctatatatacatatataaaactatatatatatatagtttctacttttttcatttaatatactttgtggatattgtcatgtgagtatgaataggtctactttttaaaaaatacctttctaacattccatagcattaattactagtatctattagatttttctttttctttttttttttttttttgagacagagtctcactctgttgtcaggctggagtgcagtggcatgatctcagctcactgcagtctctgccaccccgggttcaagcgattcccctgcctcagcctcccaagtagctgggactacaggcatgcgccaccatgcccagctaattttttgtattttagtagagatggggtttcaccatgttggccaggatggtctcgatctcttgaccycgtgatctgcccgtctcggcctcccaaagtgctgggattacaggcgtcagccaccacgcccggccacatcatgtccttttaccccttaattcttcagtatttcctttaaaaaatggcatttttatacataacctgagtagattcatgaaggtcaggaaaataatactgattcagttctatataatctacagattttattcaaatttagccagttttctcagtcatgtgctttataagtcttggatccaatctctggttacttgctgcatttcattgtcaggtatatttagcttccttcagtccgaaacagttcttcagtgtttttttgtttgtttgttttttgtttttttttttttaatctttaatgactgacatttctgaagactataggccaattattttatagaatatccctcagtttggatttgcctgatgttttgtcatgtttaggatcccagttatgcatttttagtgtgaatatcaaagaagtaaaggtgtagttttcttactgcattttatcaggaggcaatatcggcttttaccactactctggaagttaactgttatcccttggttagtacggtgtctgctaggtttttctagtataaagttaataaataaaggttttgtgggggcgtattttgacactaagtaaacattctatttcagatcaagctgtcacccacttctttttgcattcactaatacatcttccttgaatcagtgttactgcagtgggttgccaattttaaatcttgcttttcsttttggatttattagttggcttataacataggttagaggcttttcttctactctatctctatctatctatctatctatctatctatctatctatctatctatctatctttttagagtcagggtcttgctctgttgcccgggctggagtgcaatggtacagtcatagctcactgcagccttgaactcctcttctcccccattcatctcttttttctttcttcttttttttaacttataggagatggatttgtgatttccatttattcgatgatttgtaattagttactgtcatttatcttaatgtttaatttatcccagatctggctcatgggagcccatttaagctgtctcttgtctctttttgctttgtccctatcattctttgagcatttctttctttccgatacaacagcgtattccacactcatctagtactttccctaccccagccttggaatcaggcatttctccggagagtttcattttttatattcagtttattccttttatttgtgaaaagtatgtagggatggatggatggatggatggacggacggataaacaaacggatggaatggattgacagtgtctcgctttgttgcccagactggagtgcagtgacacgatcatggctcactgcagcctcaacctcctgagctcaagtgatcctcccacctcagcctcctgagtagctagaactgcaagcacatgccactatacctagctatttaaaaatttttttttaatttctattttttttagtagaattaggggtctcactttgttgcccaggctgttcttgaactccggggctcaagcagtcttcctgccttagcctcacaaagtgctgggattacaggcgtgagccaccatacctggcctgtgtaagatctaggccctggatatgctcattgcccctgggtataaagtaagtaagtgctccttggagaatgcaggggtgcagttgcttccaggcccttttgtgaaacagagctagacagtatatatttgtttacctccatatgtttgggaaaataaacatacacagagatatatttatttatccatctattaaagaccatgagttctcatcaatacctctaatatggatccattcccactgtatattttctagtctttgtcttttcatatttgtaattcccttttctaatgatgagaaatctggatttctgttaactttggtgtatttacttatttgctcaatcccctgtttgtaatcagtcttctagtcttataactgtcttcttagtctccacctcattatccttttttttttgtattttgtattttttgtaaagacgggttttcaccacgttgcccaggctagtctcaaactcctgacctcaggcagtccacccacccacattggcctcccaaagtgttgggattacaggcgtgagccaccttgcctggcctgacttggatttttatccaaaaagcaatactgccacccagtgtttgcacagtttacatttttagatttttagaaactgttttaagaatctcttcatccttagcttagaaattattaaaggatctrccttttttttttttatggaattatatttttgtatctcacatacttargttcatttattatatataaatatatataaatttactgaaagttygctgtggtgtttgcacaattaaattctataatgagcattttacttttttagagtcgaggtggaaaaaagtttcttcctgtattgaaagaaatcttggacagggatcccttgtctcaactgtgtgaaaatgaaatggatcttatttggactttgcgacaagactgccgagagattttcccacaatcactgccaaaattactgctgtcaatcaagtggaataaacttgaggatgttgctcaggtaacaaaagatcgtttctataactttttttgggtgtatggtacttggttggattcacataaagtatccttttctcataggtatattttcatagataggataatttaagcaggagaaattttgaggttttaaactcttatactccaagtaatggaccagaacatttccagaatttaaaaatctcagattttgggtaggattgccatacctttcaccaaatacaattgaaacattgatcttgggacaattatctatcaaaagtaccactttctaagacgtgggtaccttctaccagcttcatcagtgaactccagagttttaaatcttttagactctttgcaatgactgttctagaatgaatgtccattgtttgaaaattacatctattacagagaataatattttagataatatatcattcaggtcaattttaacattcatttcagttgtccagtattgctgaatgtatgcgttttgacagaatagaaaaaagaccattttgcttcagaaacccaccaaattttagttccctgatttaattttcaagaccctgccaaaaagcactggcatttattcaattcaaacaacccaccagtgctcaatagaaagacctttgaaatgggttttttaatcagaacaaataaatttggtctactaaaataaccaaattttttcatgttacttatttcagttcaatgaatctctctagtatgtagtcttagtaaatctatagtgactaaaaatttagtgaagaaatacagatttatcttaattatatgcattttaaaaatctttggatttattgtttcacttctcaatttaagagtagaaaggatttcttttgtgtttacttttagtgtctaaagatctttggagccaggcatggtagcacacacctctaatcccagcactttgggaggccaaggcaggtggatcgcttgagctcaggagttccagaccagcctgggcaacatggtgaaaccccatctctacaaaaaatacaaacattagctggacatgctggcatgtgcctgtagtcctagctacttgagtggctgaaatgggagaattgttggaatctgggaggttgaggctgcagtgaaccaaatgccattgcactctaccctgggcaatagagtgagaccttgtctcaaaaaaataaaatggctggggtctgtggctcatgtctgtaatcccagcactttgggaggctgaggtgggcagatcaggaggttgagaccagctcagcaatttaagaccagcctgggcaacatggcaaaaccttgtctctacaacaaatacaaaaattaaccagacatggtggtgcacgcctgttccagctactcgggaggttgggacaggaggatcattcgagcccgggaggctgaggttgcagtgagccaagattgtgccattgtattctagcctgggtgacagagggagaccctgtctcaaataaataaataaataaataaataaataaatctttggagacatgttatataattatattattgtgtgyacctcgattaaacttgtttccaccttagaccaaattagactgaaaaggaactattttattttaattgctgtagaatagttattgtcttctagccactgatgtattatctaaattcaggattcgttttccatgaaccttcagtaatggaaaacaagatctaagcatttttttagttgacacatttgcctgtttcttttggatagtgtctagtgctgagtacatatytaagaaatgcatcatattatttcattagaatcacaatggaaagaatttcttgctgtactcttaaaagctgtcttatagagaggtttggtgagttttggcaatttatttaattttacacttacatgatttaatttttaataattataaataatcttaccaaagtcattactttccaatggtagagttgtttttaaccacaacattgttgaacctctagtattacataatcttatctctccttttcagtgttatttatgggcagtgtattccaagtattaactggagatatgaggagttttttttattactgctatttcaaaacccaggaaatggtctcttcccaactcttctgctcataaagaagactgctggtccattagggcctttggcaaagcagggaggggggatctattagtgagaaaaattggggatgaggttggtgctttatgtctttatatcagtatttctcaacctgttttcatcactatacctttaggagcttttatagacccttttccccccaataacccatgagattttgattccgtagatacatggtacatcttttcatgtacgtatttgtatctgtgctttatacataaaaaaagagctagccttattcaatatagggttaagaatagctaagtaaaacttaagtttaaagttaaaatttaggctgggtatggtggctcaagcctgtaatcccagcactttgggaagcagaggcaggaggatcacttgagtctaggaatttgagaccagcaacatagcgagaccctatctctacaagaataaataaatgaaataaaattagctgggcatggtggcgtgttcctgtagtcctagctactcaggaggctgagttgggaggattgcttgtacccaggagttcaaggctgcagtgagstacgatagtgccactgcactccwggctggacaacagaatgagaccctatctcttacaaaaaaaaaaaaaaaggttaaaatttaaaaattactaggcattccactgtatttgctaagtaactatgtaatttattcacgtaggtgaattytaatgtgtcaaattacatatataagttaacaatttatgctgagtgcagtggctcatgcctgtaatcccagaactttggggccaaggtgggtggatcacctgacgtcaggagttcaagaccagcctggccaacatggtgaaaccccatctcaaaaaaaaaaaaaaaaaaaaaaatacaaaaaattagctgggcatagtggcaggcacctgtaatcccagctactcgggaggctgaggcaggagaatctgggaggaggcttgaatccaggaaggagaggttgtagtgagccaagattgcactattgtactccatcctgggcaacaagagtgaaactgtctcagaaaaaagttaacaatttatataaatatatgctaataatagagtaattaaattttaaaaaatcattcaaaagtattgttttcgcaaaaatatttttcaaatgtaaaacaactgaaaaaattaagctaatttttaaaaaattagttaacttttatttacttttgcttgatatgagaaaatgccttttaacttagctggtagatactcatttagatattgttgacttttgggggagggcttgccataattatagattgaataacttgtagaattaaataataaaatataaacggtttttattgaattctcaaagcttaattggtcggagaataaaacttaacatccacaagatagccaacaagcttgcaggccacctctcccagtatgactttgagcaatcaattgaaagaaaatcctctaaccactgccatctatttgccatagttttacagcagtgatcttgcatacatatcatataccttccatgacgttgatgtcagtggtacttaggtgatacccaggaaaatccaatgagagaaattaaatactaaggaataagattttatcagatggaattgagctttagaaaggctacaaattcaacatttttttctctctcacccataaaatttatttgggggtaagtacttcatagcttttcagacttaatctatagaatgtttcaacaacaaagacaatctttattagtctctattaacaggaatggatttttgaggcatcaataattaaaagtgagctttgccttcttttgacctatcttggtgctcctgtgtgtcaaggaaaattagattacttttgtcccccattatttctgaaccagtttcattttttaaacagcttcaggcgctgcttcagatttggcctaaactgcccccccgggaggccctagagcttctggatttcaactatccagaccagtaygttcgagaatatgctgtaggctgcctgcgacagatgaggtatcttctgcaggtggttttctttggggcaaggaataacttgggtgggtttgggatgagggtgtctccttgatgtctcataagaaagaaaagggctcagaattattcacagttcaaagcatttgctcatgtactcctgccagctccccaactcaatgtttatactagaaaaaaaaaaccaaaagcatgctaggtcagaaggtcctcaagatcaccctcaggtttgatgactcactgggaggactcagaactcagcacatagtcacttacagatataatttattgcagcaaaaggatacagagcaaaatttaaagagggaaaaaggttcatggggtgaagtcatgaggaaaacaggcatacataagcttgtaagagttcttttccagtgaagtcaccccaaacacttttatttctatcaggagtgagttgtgataatacaagtctgcaagggaagcttgttagaracttcgtggccacggtttttacgggcagctatcacataagcaccctctgcctagcatgtaccagatttctatactcccagcagtaaagtggatatacaacataaaccattatttgcacaaatagtttaggtgcagtgagccactcttatcaattagggagggtggtgggaatcctgaaatcttaattcccagatgctagccatgggccaatcctataagcaggcttgttagaggatagcagccaagcctgctgtgttacctcttttcttcacacagtctatccaccctccagaattaagaaatgttaatttttgtcatgggtttaaaatatatatatatatatatatatatatatatatatatatattttaagcaaatacattacagttaaagttgaagtcctcatagtttccttatccagtcttgattacttctcttccttctcagaggcaaacattatcatgaatttggtgtgtatgcttctatatcacatttttctgtttcatatatatctatgaaaatatagacatggaattattattacacaaatgtgtcttgccatatgcattagtttatatcatgctttttaaaaatttggccagatggctgggtgtggtggcttatgcctgtaatccctgcactttgggaggctgaggcaggcagatcacttgaggtcaggagtttgagaccagcctggccaacatggtgaaaccccatctctactaaaaatacaaaaaattagccaggcgtggtggccggtgcctgtaatctcagctactcaggaggctgaggcagaagaatcacttgaacccaggaggcagaggttgcagtgggcagagatcgtaccactgcactccagcctggttgacagagcgagactccgtctccaaaaaaaaataataataattcagccagctgtggtggctcacacctataatcccatcactttgggagacaaacgcaggcagatcgatgagcccaggagtttgagaccagccttggcaacatggttaagccccgtctctaccaaaaatacagagacattagctgggcgtggaggtrcgcacctgtggtcccagctacttgggcggctgaggtaggaggatcacttgagccctggaggcggaggttgcaggagctgagatggtgccactacactccagcctgggtgacagagtgagaccctgtstcaaaaaataaaatacaaatacataaataaataaaaattcaacatcaggtttttgaggttagtctctcccattatgtttaaatgtcatttattcctttcactactgtgtaatattctgtcatagggatatatcttatttaattcattccctattaaggaatatttaagtttctccacatttccctattataaataatgcttcagtgaacatgtttgtacagtctcccttggatggtgcatttgtgagaatctatgagattcactgaagaaatgactgtctcagacaatgaagtttatccattttctttctaggttcaaaartgaggcttatgtactttatggtttttgaaacataaaagcccacaaaatagtgtggatactatgatccttttttctttttaaaatcgtgtatgttttaagctgtgtaatagccaaaagtaattacacagactcaccaatagtgcttacttctggggagtgaaattagaaatgtgagagaagaggaaacagcttcctattcctatactttctattttttacactatttataggttatatagtgggcatgaattttacaataaacctaatcaaaattgtgttatagatagttttaaaaaatgaattcccagttgcttcaccatctgcttaagtttgcattggagacctgttgtggaggggccacctggttctccttgggctgagccaagtgtttttcttaaacgcattgatccctctgaggagayggcagtgatccgtgtattccgtgtagctaattctggtggtttttctattgtgaaatttctggttatgagtttttggttttggtatatagtgccctgggtttcagtcccagatatctgccttagactactaattccttaaccatttattacccaatactgtggagagtaagtggagcacttggggcacttgggcttcataccttatactgctggagttgcctctgataggagtgtgtttacaggtagaatggtttggagattgacacaaaatagagaaccactaaccttaattaattgagctcagttaattacaatgttatctgttatattatttcaatgatcaattcccacttataaatgtattcactttctcatccttcaaactatttgaagttaagattttaattgtacattggttatctgggacaacttaaccctaataacagcaaaggaaaataaattgtgaaagtactgatggaatttttattttaaaaatgattgttttactaagcacaaattttttagcatgatcagaaatcagtattaaagtacctaatatttttggtaactcttagctgactgaaaaatacagtcatgaattttaacaatctgtagtagtccattttcacaccattataaagaattacctgagactgggtaatttataaaggaaagatgtttaattgactcacagttccacatggctagggaggcctcacaaaacttaaaattatggtagaaggcgaaggagaagcaagtaccatcttcacaaggtggcaggaaaagggaaagagcaggggaaaccacctcttatgaagccatcagatctcatgagaactcactcactgtcatgagactagcatggagggccacattgattcagtcacctcccaccaggatgctcctttgacatgtgggaattatagggattataatttgaggtgagatttgagtagggacaaaagccagaccatatcacaatctaattcatttgattaaaatatctctagtatctgttctttgaccctcttgactcccttttccccatctgaaatcttcagctttttttgtgatattgtaacagtggtacagtgaaggaaagcatgtaacaagcctggcccaaaagaaccattgtgtttcaacaagttcacatttgatagtttgataccaagggatctttttctggcacaggttgtttggttactcactgtgtcttttgtttctttcagtgatgaagaactttctcaatatcttttacaactggtgcargtgttaaaatatgagccttttcttgattgtgccctctctagattcctattagaaagagcacttggtaatcggaggatagggcagtttctattttggcatcttaggtaagtcttttatattttactttgagcccaccaggtgctttagtaactataaacaagcataatatatttaatagaaaaatagctgctttagtttttttytgaaccgtttataacatttatatggttttggtgccttctcctgtttcttgataccagcactcttgatttttatgatttgagatttgacaaagtaattcagttatccaagacccttatgtgtccctccatgcctgcttgatttcttcatttcttccttcctttcttttttttttttttgtgtgtgttttctacctgcttgatttttaactgaaattaataatgtattgctattttccagtaaagtgtacttattgtcttaatatatttgggctcaatgcagacctatttatttcatctagaaagttgtgggtggtactgtcattactagtgttattgagtgaaggtaaaggtatactataatgacagcaattttattcaatttctttattaagtaggtaatttccagaaatacacgaaccttacttcaccaagttcatataagagtaaaatcaggaatgagaactaaagttattcctttgttttctaaggaaattgtattaatagatttctcatttctgactctgtactcagacattttttttccctcccaatctggacttcatagtrctgaaactaatgcttgtcaraaaaaaaaactaccttttttctttctttctctctttctccttccttccttttcttttctttttcttcttttcttcttttttcttttctttgctgagcttctcaaaggcaataagctctataatgttgtgctcttaattttagttttatttctgaatatggttttcttattcatatatttttttccactcttttttttactttcttgtgttgttctagaaccttttcttatttttaacttgtcttttctcattcattcagtcttagtttttaaacctctcagggaataacaaaataagtattccttcctttttcaaatatgtacatcactttttaagtaagaaaaaaattggaatagatgctaatcagggcattagtcaattgtttaataccagtcagatttcatagatacctgtttcagcctattgtctttaaattggtaagattgccttacccgtacaaaagcaaatcaggtaagatgtacacattttagacttcttggaataaagaattaactaattatagaatatcatagcttttgaactttgaagtattaactaactatagaatatcatagcttttgaactttgaagtattaactaattatagaatatcatagcttttgaactttgaagtattaactaattatagaatatcatagcttttgaactttgaagtttaacaaattggaaagttgacccatgtcactaataattatgcacaaagtagccaggcgtggtggctcatgcctgttcccagcactttgggaggccaaggtggatggatcacttgaggccaggagtttagaccagcctggccacatggcaaaaccctgtctctactaaaaatgcaaaattagccaggcatggtggcgcatgcctataatcccagctactcgggaggctgaggcaggagaatcgcaagtatgaaggggctggccaccccatccacattcgagccagaaatggggaggggagggaaggggagggaccagcatttccttctaagtccaggactcattttttgtgcacatcacttcatcttgcatcctgttggctagaacctagtcacctagcgacatctagctacacttttttattttaggcaagcttgaacccggtgggtggagattgcagtgagccgagatcacaccagtgcacaccagcctgggcaacagagtgagactctcaaaaaaggaaggaagggaggaaggaaataataatgcacacaatgaccttgccatcataagtttattttttgtagaataaagaagtcagtatttattcggtgatctgaagtgtttgataaacaaactgttcagatatcattaactttctgcaggtcagaagtgcacattcctgctgtctcagtacaatttggtgtcatccttgaagcatactgccggggaagtgtggggcacatgaaagtgctttctaagcaggtatcagcttgttttatttattcattttttctttttttgacagacaacgtttaaagcatgaatatcagcttgttttaatcttcatgttcaatttggtacttggtgtttgatcagttttatcaaatgccatttctcccaccacattatttcatagaagtctcagtaacagacaacctgatgaatacattcttttgtcaaaatttaagtcaaaaaatgaagtttcaatgaacttagcacaaaaatattaactgaatgctacctgaaaaataattactcggcattcctaatatattctatattaatcccaaagtgctaagaaatgcagatgtgaaccaccacacccagccccacccttttttttttttttttttttttgtgacagagtctcgctctgttgcccaggctggagtgcaatggcactatcttggctcactgcgacctccgcctcccgggttcaagcgattctcctgcctcagcctcccgagtagctgggactacaggcatgcgccaccatgcccagctaatattttgtatttttagtagagacagggtttcactgtgttggccaagctggtcttgaactcctgacctcgtgatccgcccgcctcggcctcccaaagtgctgggattacatgtgtgagccaccgtacctggctgccccaccctatttttatatcagattcctaatttccagttaaactactcttttctaattcatttgcattgccagaagaactctcataggcttccattaggtgtttttaatatttaggatttttcatgatgttaaaaactttttctgatcccttmcttttgaaaagcccattaatgattgtaataatagctaatgtttattcatcacttattatgggtcatttattcttaacaacaacatggaatcaatattattaatcctctgaattttatagaaccctgaaatatatctcacatctctgcctatttcccttgtgttcatggctaccatcctagtccaagctactattctttttcactggacttcttcattaactatctaaattgtaccccktgtttcccttcctacatctcccccaacattctatacacagaagataaagtgacattttaaaaatgtagactgtggccagatgcagtggctcacacctgaaaacccagcactttgaaaggctaaggtgggaggatcacttaagcccagaagtttgagactaacctgcacaacatagtgagacccatctctagaaaaaattagaaggtggcttgcaactgtagtcccagctacttgagaggccgaggtgggaggattgcttgagcccaggaatttgaggttgcagtgagctatgatttgattgtaccactacaccctagcctgggcaacagagcaagaccctgtctcaaaaaaagaagtagattgtattacatcatttcccttttaaaatcccttcaataatttttcattgcactatgagtaaaattcaaattttctgccaaagcctgttaggccatacttagtcataacttgcttattgtcatcatataaccattttccacactgcatattttctgggagcctcagcttgatgttaaagacaataaaaggatgatatatgtatgaacaaattattctaactcctgtttttttttttttttgattgatgaattgtgagaggaagactttaccctgtacatagctgttcttgttattactataaacttacaaaaggacaaggtgttgaaacacttaaagtattagacttatgtccatggggtattcaggacactgttccaggaagtgtggatatcaacacaattagagatggagcatgaaaactttcaactgtacagacatggaagaagtttcaaatttcacatacttgtaaaaagttcctgtttgcttagcccagtttttatctggttgccttgtcaccagtgtttgtacagctcctgaaactgttgagaagtagagtgatctgtggttttaacagatggctaacttggtaagtttcagccatctcaattttatcatcaagctgcataggtccttcctagtttcctgtgagcaaggtctcagcctctgtggaaactgcatgcttgaattcatctccctacatagtcttagtggtytccttgcatagaagcagaatttaaaaatgaaaacatgttataaattaaatctcttgttcatggaatttcaagccacattgtttatatttgtgatagacatattttatatgcttgttacggtatactttttaattctatttttaacatttgttttttccagttttaatgatatacttgtaaaataagctgctccttctttatgcgtggctgaagttgttatgaattttatgtactgtgacataaaagaccctcagttattaaataataaagttgaattttatttgttgttattatttatttatttattttattttttgtgatggagtctcactctgtcacccaggctggagtacagtggcatgatcttggctcactacaacctctgccttccagattcaagtgattctcctgcctcagcctccctagtagctgtgattacaggtgtgcgccaccacgcttggctaatttttgtatttttagtagagaggaggtttcaccatattggccaggctggtcttgaactcctgacctcaagtgatccgcccacttcagcttcccaaaatactgggattacaggcatgagccactgcacctgaccctgatttatttattttttgagacatagtctcactgtgttgcccaggctggagagtgtagtggtacgatcttggctcactgcagcctccagctcccaggttccagtgattctcctgcctcagcctcctgagtagctgggattacaggtgcacaccaccgtgtctggctaatttttgtatttttagtagatagggggtttctccatgttggccaggctggtcttgaactcctggcctcaactcatccacttgcctcagyttcccaaagtgctgggattacagacgtgagccatcacacccagcctaaagttgaattttaaacataatggttttgatttagttggccattgttgatacaccttgtactacttgcataagtttttttttttacttgcataagttttgatagccatagttattataaaaacaagtaatttagatttgaataacaaatagcatgtctatattcacactttattataaaataattcgttctagctatgctgttaatggaaatagaatatattgagatatcatacaagagtgatgacaagaagtagatattaaggttgaatagcaagaacctcagagttacttctacataggtttttctctaatactakgaagttggccaaatggactggtttaggttagtgatgtctcaaattctactatacaatgaattgcagaattttgagtagtttaagtttcatatttatcttctttctttctttcctttttttttttttttttttttttttttggagacagtttctcactctyttacccaggctggagtgctgcagkggcttaatcttggctcactgcaacctccacctccaaggttaaagcgattcttatgcctcagcctcccaagtagctgggattacaggcaagtgccaccatgcccagcaaatttttgtatttctttttgtagagatagggtttcgccatgttgcccaggctagtctcaaactcctgacctcaagtgatccagctgcctcagcctcccaaagtgctgggccacatttatcttcttaagtacccatagtgcgcacctggcccacatttatcttaagtacccataatctaagtctgcttttctcgaatttgtaagattttgtttaagaaaaggtttaaagaaagtttgaaaatgatgctataacaactgttaaaaataagtttattgtatgtaaaatgcttttcgtaagtcagacactatttttacttcagctggttatgtgtgtttatggttatgtgtatatgttgggagcaggtgttattgattgatatgatcacatgatattatattacttttagtcaaatgaatttttgrtgtggggaacttatttttcaggttgaagcactcaataagttaaaaactttaaatagtttaatcaaactgaatgccgtgaagttaaacagagccaaagggaaggaggccatgcatacctgtttaaaacagagtgcttaccgggaagccctctctgacctgcagtcacccctgaacccatgtgttatcctctcagaactctagtaagtgactgtgctttgcgcagtgaatctcctatgaatagcaagcagaaagtcactgccttatgggagtagtaggrccagctgtcagcctcaggaagtagaatataattaaggaaggaaaatcttaaaagttctccgaggctatgcttatattcaataggatgtatgcttatcagctaaacttaccagtggatttagtgaaagttattacaaatgaatttatatttcaattatatgtaattaaatttattttctatattactgatttttaagagttgacaatcctaataagcaaaatgttgcaaactgtagtaaattatttactgattgattttcctattttaaaataagatcttgtcttgagtgaatttggcaacttatttctcactttctcattccctacaaaagtaataatggaaaataatagtctgtattcagtatattatcagtattcaaatgaatcccttgttaagaaatcaagaatggtctcaaaatagttctaattttaatccaatgatttgttctaattttttattcactaaatgtaataatgtaaagttaagcaaataaaaggaaacgagagaaggaatgttaagtggagaaggtgagaagggccaatcttaggttttgagtccagcctatctggcattagtatatgccacccaaggctgtcctcatggttgcttttctaccaagtgggactcttctawgtctgactcttctgcagacctgacaggaataggtgaggagttttcccaagcctagtatatagtggtaaaattataatcttckgtatcattacactgaagttgactaattttccccacttgatttcagtgttgaaaagtgcaaatacatggattccaaaatgaagcctttgtggctggtatacaataacaaggtatttggtgaggattcagttggagtgatttttaaaaatggtgatggtaagtactgagatttttaacatcaaatttcttagaatttttcatttgttgccattttgctttatctgaaaggtgatgtgtagtgtaagtgtgtaacaatttgcagccaggaaggtagctattaatggtcctaaagtcaagttgaacatgtcctaaatgctttttttttccccctcttataaaatgatttataccattcacttaaatatactgtcctaatgaaccttcttttatttccccctacaaaatacaaaacgcgcctactcctttgattaaaaagcttatgaaatacaagatattatttttacttttttttttttttttttgagacagggtctcactgtcacccagcctggagtgcaatggcacgatcttggctcactgaaacctccacctcccaggcccaagkgatcatcctacctcagcccccagagtagctggaactacaggcacacaccaccacacctggttcactttttgtattttttgtaaagatggggtttcaccatgttgaccagggtggtattgaactcctgagctcaagtgattyacccaccccggcctttcaaagtgctgggattacaagcatgagccaccgtgcccaggcaaggatattttcagtaatatattcatacatcttgtttcagtgatagcaatattgattttgctgccatagttttgtattttgatgaaagtacctaacagacccaaaatgtgtaaaggaaatgcctctgaagtaatcataccagccaataggcagtggtgacttgttagttatgtgactacaaacaaggcacagaaaactgrttgagcttcaggtttttcatatccttgagaattatagcatctgtatgtcagggttattaaaaggaattgagataacataagcaaatgtgcttatcagaatatgtgcttacaacttaaaaagaactcatagggttttgctaaacatttaatgtcacttgaccatacaaatgtcattatgtggatgtcactagtttcatgtgctctcttccctgaaaatacccttagacatgataataaattgaaccattacagttttgtgacctcgtgatgcagttacttacgtgattcttaagaactctccgtatagtggtaaaagcaagcaagaaggaaaaaattaaccatgtaattaatgtaatacacatacagtgtaatacaaacagtattacagcatacaattagtacccctgaacccakgtgttatcctctcggacctctagtaagtgactgtgctttgcgcagtgaatctcctgtgaatagcaagcagaaagtcactgccttatgggagtagtagggccagctgtcagcctcgggaggtagaatataatcaaggaaggaaaatcttaaaagttctccgaagctatgcttatattcaataggatgtaacttacacatggcaaacaatttaaaaaatcttttaatttaatgtctgaaataatgtcacagggacatgctatccaaagagtgtaatatttgttataaaattagtgaaaatattagcacagagtttgttaatgtttttagttaattctgagttagtcttgaattaatgagttacagggcataaaaggaaaagcacttgtaatgaagcagtttgttttcccttagatttacgacaggatatgttgacactccaaatgttgcgcttgatggatttactctggaaagaagctggtttggatcttcggtgagatctagtctttttttttttttcagtctaatgtcttcccatagcaaaaatatctagaatttcttgttaattccttccctcttgttcttatttttagttgttgttcataataatatttatatagcactttagaatgtactttcaaatatgttgtcttgcctaaactttttcagtttaaaactacacatgttactgaaattccagaaagaaggaataggtttgaactttaataaggtttggacagacagccagaattacattccaacctatggtgttgaaagatgtactgtgggtcatggcaatgacaaggccagagaaagtcctgtgcctttttatacttagtccagggacattgatttctctacctaccaagggaaaagagaggaaaatgtttaggtgcattctcaggtttttagtttgccaccatcaataggggtagatagtgagcggaagaggtttgtggtgtcgtgacaraaaaaaggaaacataaaatcaagcctcagactgggaatcgtattcacaatgaacagaacaaggggtaaatatttaaagagcccatagaagtgaacataaggaaaagatgtgaaaaggcattttataaaaagtataaaaacaaactaataggcatgttggcacacacctgtaatcccagcactttgggagaccaaagcgggcmgatcacttgaggtcaggagtttgagaccagcctggcccacatggtgaaaccctgtctcttctaaaaatacaaaagttagccaggcgtggagcacatgcccgtactcccagctactctggtggctgaggcatgagaatcgcttaaacccgggaagtggaggttgcagggaacagagattgcaccactacactccagcctggatgacaaagtgagactctgtctcaaaaaaaaaaaaaaaaaaaaaaactaacatgaaaattgtcagttccaattaagaagtacagattataagaacaattgggccgtgcatggtggctcactcctgtaatcctagccctttgggaggccgaggcaggtggattgcctgaggtcccgagttcacgaccagcctggccaacatggtgaaacccagctctactaaaaatacaaaaaattagtaggttgtggtggcaggagcctgtaatcccagctactcgggaggctgaggcaggagaattgcttgaacctgagaggcggaagttgcggtgagcgagatcgtgccactgcattccagtcagggcaacaagagcgaaactttgtctcaaaaaattaaaaaaaaaaaagaacaactggatatcctaacaaagattttcttaaatgataatccagtctagggtgctattgaagcaacaaaaacacaggtatttttatatactattataaattaatataaaccttaatgtatgaagttaatttatactctttatatccagtatttccacaatttactttaaaattggaattgtagacagagatttatacacaaagatatagtccagttcatcagtgttttcaaatttattaccacatatttttttataacatcctcttgtaattttaaaatctgtgctatgctgtgtctaatatttttcttcttcctcttttttttttttgagacagtctcgctctgtcacccaggctggagtgcagtggtgcgatctcggctcactgcagcctccgcctcctgagttcaagcgattctcctgcctcagcctcgcgagtagctgggattacaggcacccaccaccacgcccggctaatttttgtatttttagtagagatgggatttcgccatgtttgtcaggctggtctcaaactcctgaccttgtgatctgcctgccttgggctcccaaagtgctggaattacaggcgtgagtcgccgccccctgtcttttcttctttttatatgcagttattgtcagttattattagagatttgcttccttattagtatggtttcagctgggcttctaattttgttgatttttttgtttcctactttatcagttattactttttttttttttttttacttttgtgtttattctgttctcattttttaaaatgaactcttggctgggtgcagtggcttacgcctgtaatcccagcactttgggaagccaaggkggatcactttcgctcaggagtttgagaccagcctgggcaacatggtgaaaccctgtctctacaataataataataataataataataataataattagccaggcatgttggcatgtgcctatagtcccagctacttgggagctgaggagggaggatttcttgagcccaggaggtcaaggctgcagtgagccaagatcacgctactgcacttcagcttgtgtgacaaagtgagaccctaatctcaaaaaagaaaaaaaaagaactcttaacttttaaaatggaaatatttatgtactttcataatatatcaaacagtatataaattctaaatatttcataatttctatttttatcttattgactcctgaactatttaaaattacagctggatacagtggctcttgcttgtaatcctaatattttggaaggccaaggtgagaggatcgcttgaacccgggagttcaagactatcctgggcaacagagcaagaccctagctcagtaaataaatagataaataaataaataaaatttaatttccaaaggcatacttttttgttctctttatgatttctaattttattgtgttgttattgtatcaagtatatgttcagatctatattctcattaaacttcagttttgatttgtcacttcgtaggtatgttacaagctcctattataattgacatttgtcattgcctgcctgaaatcttatcagtttttgtttatcttgatcttatatttgttttttctttttttgtttgtttgtttgttttttgagtcagagtcttactctgtcacccaggctggagtgtagtggcaggatctcagctcactgcaatctctgcctcctgggttcaagcaattctcatacctcagcctcccgagtagctgggattacaggcacgggtcaccaggcttggttaatttttgtatttttagtagagacgaggtttcaccatgttggccaggctggtctcgaactactggcctcaagcattgatcttatatttgtaaatctatacaaggtttgatttcttttagcttctgtgccctcctttatcattaagaaatatgcctcttaatccctagtaattttgttttagtctgttttgtccaaaattgacatttgtataccagcttattttggttagtatttacctttgtatcttttatttttaacttttatttcattttatattatatttgtctcctgtaaatagcatatagttgaatttttttgtgaggatggatttactccaatatgaatgtattttattaggaaattttaattgtttattgtgattactatatacttatttatttctactatcttattgtatgttttatatttacatccttgtttttgtcctttttctcatttatttccttttattggattgataggggttttaaattttcattttccctttctataaaatactttttaaattcttacttattaaaaaaattttttttagagatagagtctcactgttacccacgcttgagtgcactggcatgatcatagctcactgctgccacaaactccttggtaacacaatcctagctcactgcagccacaaactcctgggtagcagaatcatagctcactacagtcacaaactcctgggtaccagcaatcctctcacctcagcttcttgagtagctaggactacaggcacatgccaccatgcctgtaatcccaagcactttgggatttaaaattttttttgagagacagagtctcactatgttgctctctctggtctcaaactcctggcctcaagcgatcctcccacctcagtcttacaagtatctgggattacagacatrtgccaccatacccagctcttatatagaatctttatatactatattatttattttagggaatattcttaagtttttaaactgcatatttgatttaacaagttttttttgtttgaaacgggagtttccctcttgttgcccaggccagagtgcaatggcacgatctcagctcactgcaacctccgcctcccrggttcaagtgattctcctgcctcagcctcccgagtagctgggattataggaatgtgccaccatgcctggctaattttgtagttttagtaagacggggtttctccatgttggtcaggctggtcttgaactcccgacttcaggtgatccgcccgccttggcctcccaaagtattgggattacaggcatgagtcaccrcgcccagccagatttaacaaattccaaaattaatccataacttagccctcttcttgatcattataggtactttaggataaattctaccacttatattttaactaatatttaacaactccttatattattcgttacagtgaatttttactagaatttcttgtatacaattttaaatatttcttcattcaccattgctttttgtaccatactccctcactccgggttttgtctgaaaatgaatttatattaccctcaatcttgagtaaggctgggcacggtggctcacgcctgtaacccagcactttgagaggccaaggtgggtggatcacctgagatcagtagttcaagaccagcctgacaaacatggtgataccccgtctctactaaaaatacaaaattagtgaggcatggtggcacatccctgtaatcccagctactggggaggctgaggcaggagaatctcttgaacccaggaaggggaggttgcagtgagcggagatggcaccattgcatactccagcctgggcaacaagagcgaagctccatctcaaaaaaaaaaaaaaaaatcttgcataatagtttagctgggtatggagtttttgtttactattattgggatacagtataattgtcatatcacaattcactggtttagagtgtacatttcagtggttatatgcattttctgagttgtgcaaccatcacyacaattaattttacaacatttttatcaacccttcaaaaaccctgcactccttagctgttacccccaaccccctccctgaaaccactccaattctaggcaaccactaattaatggtctatagatgtaccttttttggacattttatataaatggaaacacaatatggggcctttgtcrctggcttctttctctaagcgtaatggcttcaaagtgtattcatgttttaacagtaaccagtatttcatttcattgtcaaacaatattcttttgcaaggatgtgccacattttatttatccatacatcagttaatgaatattttggttggtttcactattttgctattacaataactgctataaaactatacatagataaatgtacacagttaatgctataaacatttgtgtacaacttttgagtcaatctgtgttttaaattcttttggtaaatacctaggattaaaattactggaactgatgttaactttatgttcaactttttgagaaactatcaaactgtttcccacacagctgcatcattttacattccaaccagcaatgtacaaaggttccaatttctcttcattctcaccaacacttgttattgtccatctttttttattatagccaccctagtaggtttgaggtgttatctcattgtggatttaatttgcattttcccaatgactaatgttgttgagcagcttttcatgtgcttgttggttatttctataccttttttggtgaaatgtccatttagatcctctgctcatttgtaaattgggttatttgtctttttattgttaagttataagaattctttatatattttatatactagacccttcttagataaattatttgcaaatatgtttttctggttgtttgttcactttaatttttaaatagtgtgtgtggtaggaatccaactttattcttttccatttagatgtatagttgtctcagcaccatttgttgaaaagattattctttcttcattgaattatcttggcatctatgtcaaaaatcaattgattgtacatgtgaaggttttttcctgaactctaagttcaattctatatgtctgtccctatgtatagttttgattactgtaaattaataataagttttgaaaccaggaagaatgaatcctccaacctttgttctttctctcttttcatttatctgggattgtgttaatttttcctttgtttctgaataagaattttgctacttgataggttttctttcagcatgtctaatatgtcatcccactttcttctggcttccctggtttctcatgagaaatcagctgttaatcttatttaagatccttgtaagtgatgagtcacatctctcttgttcctttcaagattctctttatttttggttcttgacagttcgattataatatgcctacttctattagagtttattctactttgaattaattgagcatcctggacatatatattattgtttttcataaaatttggggagtttccagccataattttttcatatattttttctgcctctctctctcatctccttcttaaacgccattatgcatttattgctttgcttggtggtgttctacaggtctctaaggctctgttcttttttcttcattattttttcttttgtttctctgattggataattgacctatccacaagtttgccaattttttattatgctcatatctgctgttgtgtctacctggtgaattttaaaatttcagttattgcccttttcaactctggaatttctgtttgattcatttaaataatatctatctattgatagtcttcctttgttgatayatcattctcacagttgttttgttttgttttgttttgagatagggtcttgtgctgtcgcccaggctggagtgcagtggcgcggtctcggctcactgacacctccacctcccaggttcaaacgattctccacctcagcctcccaagtagctgggataatgacaagcggccactacaactcctggctaatttttgtacttttagtggagacagggtttcatcacgttggccaggctggtcttgaactcctgacctcaggtgatccacctgccttggcctcccaaagtgctgggattacaggtgtgagccaccgcccccaaccttatagttctttaaacatggtttcctttagttctttgaacatgtttaaaatagggatttttaaatctttgtgtaataagttgaaaatttgattttcctgaaggacggtttcattgaatgcatttttcctgtatgtgtgccatgcttttttgtttctttgtatgtcacatactttttgccaaaaactgttcactttaaataattttacaactctgaaactcagattccttctcccttcaggatttgtcgttgtggctgtttgtttattttagtgacttttttgaactaattatgtaaagtttatattttttgtcatgtgtggtcactgatgtctttacttagtttattggtcagctaatggttgacctgattttcttaaatgcctggaatccacccctcttccagtctgctgaggcactttatgcacatgttgggtcatgccttcaacagtcagcctggtggttcagaactgtgccttagccctaactttctgctttcacaaagcctcaaagttagccatagttgagagccagggctttgtaagctctttcctttgcatgtacacagacctgggaatccacaatagtatccatgcacacggccttctagattcctaccagtaattttggagcttttcagtgcaccatatggacatgtaattacctaccttttccttttaagctttcagttagcttgttggttcccccaactgttatttacccccaagacagctacaatgttaaacagatgcctctgagtatttttgagaaactccccaggaaaaaggcagttcatgctaggtgaggtctgagtcaggtcaaataaacatagtattgtaagtgggatcttcctggaaactaccagagaggccaaagaatgacagttctgtgggaatcaggctttgaaggagctccaacttcatttttctttcctctagtggctgtcagacatgcattcaccatgattgtgggctatttgttgtcaaggctaccacataactgggaagggggttgggactaggccatggtaaaacaaaacagattcacgttggggtgtgtgtgtgtgtatgtgtgtgtgtacgtgtgtgtgtgttttaaataaacacttattggattgctgcaagcctttsttttattttcagaactctaaaatagttgatttcaacaatttttgtcagtattcttgttgcttttatggagaagtagatattcagagtttgatatcatttggctatagaagtttgaaatccaaattgactgctttcctcagaagccttgaggatattattcatttgtcttctagtctcggtttttaaaaagtctgttctcgrtctggttatcggttctttgtaagtaatgtcttttttacaccttagtgcatcaaaaagtttctctttgcctttgtctgcrgtacaatctgtgcgtgtgtatttcttttatttcttttttttatcaccattttcattgtgccttttcaaagaagtcacatcttttagtttctgaaaactttgaacatttccttcagtattgcagttctcccactctcattgtctttttctgcagctctagtagatttatattaaactttcctgttctctcctttatgtctcttaaccttccatattttctatcttttcatatcttatcattataacagttttactcaagtctctgtgtgctctggcgttgagaccaggctgagtcttttcatatctttatgtgactttcttagtaatttcctattcttttccagttcattatctctgcaacaatgtttactctcctgtattgtattttttttctgcttagactttctattctttttcatctctttctctctctctcttttttttttttttttttttcaacggagtctcactctgtcacccaggctggagtgcagtggcacgatcttggctaactgcaatctccacctcccaggttcaagcgattctcctgcctcagcctccccagtagctgggattacaggaacccaccaccacgcccggctaatttttgtatttttagtagaggcagggtttcaccatgttggccaggctggtcttgaactgttgacctcaggtgatccgcctggctccatctcccaggtcaaagtgctgggattacaggcgtgagccaccacgcccagcctaaagtctctttcagattgttcttttttagttcttgggatattactttttcatttatctgcgtgactttattcatttccttatatagttaataatactcagttttgaattcattattgatggataattatgttttctgtaaaggtcctttgctccctgggttgtgaatggatctctaaaaatgagtttgtattttgtttgagctgttgccaaaggcctgtacacacaatcagccagtttttatgttaactccctgccttcagaccatcacacctcatagatagtttatatttagatctcataagagagtgtgggaaggcttgaagttttgcacttacatgaaactttttttttttcttgcctacccagtttctggggtagatgggaaactttcatgccacatcatctgatcaatgaaaagatatttcgagttccagtcctcccagacctcagttttgtgtagtgtgggatatgatgaggttcctcttcaaataatctgatcaatcttttgttcgttaatttatagaacccccccactttttttctcctttttctccttttttttcctttttgcctttgttagatccccaggcacaccacagtaccaagcgttatcagtaccagctcacattcctttccttatttagaaagaggactaactttctagctcattacagacaccccttcccctttctctccactttttcttcatgtgcccaccctatctaaaaaaattcagatgtttagccaaccaggattagtttagattgtacaacccaaccccagccartggggaaagaatgcagaggcaggacttgcgtcaggaataaaggctgtcgtgcccctttgttcaggtgtgctctcatggcaactggccaaggaggcacccctctacgcagaagtaaaattgctttgctaagaatcctttgttcaagtgttcagtttccttaggattttgagtgttattcctaacagttctttgtcgggtccagatcctacctcatgggcctaagtccgtgactgtttttggtgggcattgaaatgtcagccaagtctaacttcctgagccactgctgtgagaaatctctatttttggaacctagaggtctttttttctttcttttttaaccacacctatttataaaacctttggacttcatcatttttttaatgtgatttagtatctgcaacaaccttagtctacaaggttgctggaaacggttagacgtgtgatcgactttgttcctgcaagattataatatctcctgattaatttcttaagtttcagttatagtctgttattatgaaacatatgtgtatatatatttttaaaacttgcaacccttgctgtttattgactgaaccaggcattgtattaagttcttctcgtaagtaatatcgtataggcttacatatctatggggctatgttatttctttttaacacattaaaaattaaaatgctagaggttttaaacaaaggttacagaaatattaaatggcagagctaaattcaaatccaggactgtcagactctaaattaatgcctgtttattattttaccagtctggctaagtgagaaaataatgtggtaagacatgtctagtactactctttgtttatcagagtataatggtgcctaaaatacctaaatttccttttttttaaaaaaagaaataattttttatttttaggtttttccaagttacactttccagtagtgtaaaggtagaaagagcaatttgggattgtagctgtgattagaataaagaaaagagatcataattcatctaaaaaggacactgtggctactacaggtgacagatttttttcttttaaattaggaggaatttctaatgcagctgtgtaaaaatagaattagtagctttgaataggtagctagtttttcaaacactcataaggtatactgcatagataagaggaataggtcattagaataaactgtctgcttgaggaccataaacccagttggacctgggctacctgtttttgtaaatgaaattttattggcacacagccacttggttacatattatgtatggctgcttttgtgctgcaactgcagagttgagtgtttagtctgtagtgcctaaaatatttattatctggctcattctgggaagagtttaccaactcctcctatataaagtaagcccccaggaatatgtttttacttgactgatcccacaaaaaaggagggaaactttaagctgaagtttagtaactcatttgttctttccaaggttagcacagaagctacacagtggtctcctttgctaattagtagattcaggccatatcatgagcttcatttagttatgaaaagctaagctaaagactgtttcctggcattcttagttccatcagcctaattgaaaaccccaaccaagttattctctcttagttttgattttatttatctaaatgtaaagcacatttagcatcaaatgaagttcattgtgacctcagacaatgggaggcacccacatgtgggagtgctggaaataaacctagtgtctagctgatgggaagcattgtgcgaagaaaaaggaacttgtctgtccagtgagatctttgctgactttttgtactttgaccccatgtttttaaaaaatgaaggactttaatttttttttaagttcatttccaaactggtacctttttctcaccaaaccttttttactgtttctataaatatatgtgctccaatgtttctattttgtttgttttttctttcggccagctgtttaggttaaagtgggtcatgtagcacacactcttttaaggtcaatcccaaatcttgaggtaccttctgtacattactgttttagtacttgtaacagtgccatgtttgcatgaatgaaaatacatawtgctcattttcatttttctatgacgttccaaaatactcttttgatacctttcatgtcagcttagatcatttataagacattgatgtgttaggactccctgacctcctttggtgaagaagtaataagcaaatcttataggctggctacatataaacctatctggccgtgggtagatttgccagtcctctgcacacccccactctaccccaacaaatacatgtgaaatcaattttttgacagttgcctccattaagacttcatatctgaattacactaatggagtttacattttacatccccccccccttttttttttttttttttgaracagggtctcactgtatcaccccagctggagtgcagtagcacaatcatggttcacsgcaacctcaactccttgggctcaggtgatcttccatctcagcctcctgagtagctgccacaggcacctgtcatcacacctggctaatttttttackttttgtagagacaaagtttcaccatgttgcccaggctggtcttaaactccttgactcaagcagtccgcccaccttggcctcccaaagtgctaggattacaggcgtgagccaccgcacctggcctacttcccttttaagagacctatacaaaagttatttaatgatagtggtgtcagcatctcagagggttggaggaagaaggtggaaataatgcaagcattaggtaaaagatttaaacttttctcctttggaagccatggctaaggtactactcagactttggtcattgtgtcagagtcagaatcagagataagaaagataaataccacataatatcactcataagtagaagctaaataatatatacacatagaagcagggtgtgggttgatgggtagtggggacttagagggatggcatgggtggttgatggcaggttgcttggtgagtacaatgtgtgttgctacagtgatggatgcactgaaggccctgacttcaccacagtgcaatatatcaatgtagcaaaattgtacttctaccccatgaatatatacaagttgtaaaacaaatttttaaagccagataacttgctatatacctgtttagagtaaggatatggagctgccatccccgtgttgtagaatttatttcatttttaaatgtttgatttagtgtgaaaggtaacagattgctacttcagtcagagagtctgagaaaggagggtaaacattactgaaattgtagtcttggcctttgtaagaagtgtagaagttgagtgcagagggtacctaggtgagatgattagggctccaagagtttgtccccagcttgacttctgtcaaactctctgagaaggatgttttttccttctcattgtgaacattctaccctcaaggcactgaaagctttcatcgttgcctgcttttgaaaaggaagttattggacttctgcctaccttggctgcaactggagtgagaggagatgcaggaaagtgagaaagtgcactttaacctggcagtgtttgctttacatgtgttatgtcatgataagaataaggggtctcattaaaaacattaatgctgcattaggagaatgcttcattctcttattttgtattttgacagttctgcccccaacctcattttgctagaactagaaaagtgcttttattattatttttttctgagatggagttttgctcttattgcccaggctggagtgcaatggtgcaatctcagctcgctgtaacctccgcctcctgggttcaagcaattctcctgcctcagcctcctgagtagctgggattacaggtgcctgccaccatgcctggctaattttttgtatttttagtagacacagggtttcagcttgttggccaggctggtctcgaacccctgatctcaggtgatccacctgcctcggccacccaaagtgctgggattacaggcatgagccaccgtgcccggatgaaaagtgcttttaaaaaagcataccccgtctctactaaaaatacaaaaaaaaaaattagccagacatggtggcaggcgcctgtagtcccagctactcgggaggctgaggcaggataatgacgtgaacccgggaggtggagcttgcagtgagccgagattgcgccactgcactccagcctgggcgacagagcgagactctgtctcaaaaaataaataaataaataaaataaaaataaataaaaaagcataaaataattcaatttttttgaaggacttttagaaactgtttaattttagaaactatctgattgtgatacatgctaacacactcatatactccctcctccccacaacacacacacagcctctctttgtcgctcataaagtccttcggaagctttctcagtgcttttaggagtatgacagaagtccttacatggccaacaggaacctgcatggtcttttcaccacttactgtgtcttcctcatctttctgttgtgctcccccttgtgctctcctccagccctgctgtcattcctccacatggaagtctttttttttttttttttttttttgagacagagtctcgctctgtcgccaggctggagtgcagtggcgcaatctcggcttactgcaacctccgcctcctgggttcaagcgattctcctgcctcagccccccaagtagctgggactataggagcacaccaccacgtccagctaatttttgtatttttagtagagacagggtttcaccatgttggccagatctgctgacctggtcgtgatctcctgaccttgtgatccacccacgttggtctcccaaagtgctgggattacaggtgtgagccaccgcacccggccaggaagtcttttttgactcctgccatgttctcctggcacttcttccttatacagagatcacacatgcacattgtacatttgctcagtgagtgtaaggactgctgctctggttttcttgtttgtttgttgcttatttctgtatcaccaggatctaacacaatgcttggttagctgtacccgagtatttactgagtgcatgaattnnnnnnnnnnnnnnnnnnnntgagaaagtgcactttaacctggcagtgtttgctttacatgtgttatgtcatgataagaataaggggtctcattaaaaacattaatgctgcattaggagaatgcttcattctcttattttgtattttgacagttctgcccccaacctcattttgctagaactagaaaagagcttttattattatttttttctgagatggagttttgctcttattgcccacgctggagtgcaatggtgcaatctcagctcgctgyaacctccgcctcctgggttcaagcgattctcctgcctcagccccccaagtagctgggactataggagcacaccaccacgtccagctaatttttgtatttttagtagagacagggtttcaccatgttggccagatctgctgacctggtcgtgatctcctgaccttgtgatccacccacgttggtctcccaaagtgctgggattacaggtgtgagccaccgcacccggccaggaagtcttttttgactcctgccatgttctcctggcacttcttccttatacagagatcacacatgcacattgtacatttgctcagtgagtgtagggactgctgctctggttttcttgtttgtttgttgcttatttctgtatcaccaggatctaacacaatgcttggttagctgtacccgagtatttactgagtgcatgaattccatccattgtattttctgtagctacctgatctttatttgaacctttcaagatatctcattccattttggtgttcttattataatagaaattagagaaaatatttgcaaccaaaatgagaaaaaggtaatattaatatacaaagagctcatataagttactgaagaaaatgtctaaagccctaataaataggcaaagaatgtaaatagctaagtcacaaaagaaatcttagaatgcttaaaagatccaggtgcaatggttcatgcctgtaatcccaacactttaggaggccaaggcagtaggatcacttgaagccaggagttacaagcttagcaacaaagcaagacctcatctctacaaaaaacaaaaaaataaaaaaactagccaggcgtagtggcactcacctgtagtcccagctattctagagccaagggagggaggattgccttgagcccagggatttgacgctatggtgagctatgatcgtgtcactgcactcagcctgggcaataaagagacacactgactcttaaaaaaaatggccaaaagagatctgagaataattatctttactaggcatcaaataagtgcaaatcaaagcaaactgccacctattaattgagcaaaacatttaattgataatctatttttcagaatgtattggtctagttagaatatcaattcttacctttctgacagatgactagtcctttgtaaatacccagtcacctcttttcagttaaagttgctgtctccaaggagtttgcaatctaattggggaggtaaaatctcaactcaagaaatgagaagtcagcatgaaaacccattgatgtcgtattgcttttgctgctctgatgtggtggctcacacctgtaatcccagcactttgggaggctggggtgagaggatcacttgaacccaggagttcaagagcagcctgggtaacatggccaaaccctgtgtcaaaaaaagtttttaaaaattagcccggcgtggtggcacatgcctgtagtcccagctactcaggaggctgaggtgagaggatggctggaggctggcaagtagaggctgtaatgaactgagatggtgccaccagaaggacggagtttcccttaaccaagataatatgtatagtggctagtctggcacatggcacttactgggtattccataaagagtagtttatttccccaaaatgtagagtaagagtgaaagactttgatccaatgtacttctgtccacctacacaagcaaatagaatgtttcaccagaataattagacaaaaaattttatatgtaattggcacattggaatccttgtaaattactccttctgttggccaagagatttactcctttggtggaacttgtgtttttccatatgacaataatatagtaatggcaagtatatcaataataataaaactttttttaaaaagtaaagggaaaatcttaccaaattaatgtttcattttaaggaaaatatractctatgcccatttttttccttccaggatgttgccttatggctgtttagcaacaggagatcgctctggcctcattgaagttgtgagcacctctgaaacaattgctgacattcagctgaacagtagcaatgtggctgctgcagcagccttcaacaaagatgcccttctgaactggcttaaagaatacaactctgggttagtttattctgtttaattatcatttttctgtacaaacagccaaacaaatactgtatgctcccaatagaagtcagcagtgtgttagaggaaatattagtgttttttatctattgcttcatttcttgttagaacaaaatgacacatagcccttcgtaaagtcttgtaaatggtgaatgttgaattctactttatctaaatcaaattttggagccccgcagtaaagttacaatctatgaatttaagtatttaaagataacatactgaagcctttgttcaagtgcatcagcttctctaattatgtgaatatatgaacttaagtgagtttttaatgagttggtagattgtgatttctccaaactaaaaaatgcaatgtttggaattatggctatggtgttagaaaagcactaatatataggaaataaaagaacttcacagtgtgagggggaaatggtctgcaagtatttttggctaaagacttcagagtcagacacattttatcgagaacttgtaatatgcaaatcagtttccaaattttgatcttaaggccttgtctccagggaatctctattacttacttctaattgaaatcagtgacttaaatgtttgaaactgcagtgcttaactcttaaacatgaaattgtagtcagtctttggtcaaaactaactaaaatgtkcccaacccctagcatgatctagcaaagccatggtctcttctaagtactgtgaacatkagtctactcacagccccaccgaaacacagctcccaggacgtttgaatatctaaggcccagttatttaatgtctttgaaggcagctctctcagcccagcccctgtgaagaccacccacactccccttggctkatccacatgttctctcatacggttttggcagctctgtgttctcctcacaattaaaaaggaaacagaggtatggtttgggtctcactctacacgcttggaggctgaaaaccttttttgcttctgttcttttctcttgttcagggatgacctggaccgagccattgaggaatttacactgtcctgtgctggctactgtgtagcttcttatgtccttgggattggtgacagacatagtgacaacatcatggtcaaaaaaactggccaggtgagctgctcctcaggatctgccaagggccttagtaatgctatttcttatgtatagcataatctcttgtgcaactcagccagattcttttgtgattcttagtgtcatatctttgtctttacttcaatttctcactacctctcgtttcatatatagtctactacatgtattcatttgtttgcttgcttgatggtaagcatttatttgtttaaaaaattactaaaggctgtgtgtggtggctcacgcctgtaatcccagcactttgggatcccgagccggccggattacctgaggtcaggagtttgagaccagcctggtcaacatggcgaaaccccgtctctactaaaaatataaaaattagccaggcatggtggcaggcgcctgtaatcccagctacttgggagactgaggcaggagaatcacttgaacctgggaggcggaggttgcagtgagccgagatcgcctcactgtgctccagcctgggcaacaagagtgaaactccatctcaaaaaaaaattattgaaaaaatttttgtagttaaagtggcctgttcttcaatataagaaatagtatttgggatacatttgtacctaacagaaggagcggataatgtactggatgtattaaatttaaagattaccaatgctattcatatcctttgcccactttttgatggggttgtttgtttttttcttgtaaatttgtttgagttcattgtagattctggacattagccatttgtcagatgagtaggttgcgaaaattttctcccattttgtaggttgcctgttcactctgatggtagtttcttttgctgtgcagaagctctttagtttaattagatcccatttgtcaattttggcttttgttgccattgcttttrgtgttttagacatgaagtccttgcccatgcctatgtcctgaatggtaatgcctaagttttcttctagggtttttatggttttaggtctaacgtttaagtctttaatccaaaagaagacatttatgcagccaacagacacatgaaaaaatgctcatcatcactggccatcagagaaatgcaaatcaaaaccacagtgggataccatctcacaccagttagaatggcaatcattaaaaagtcaggaaacaacaggtgctggagaggatgtggagaaataggaacacttttacattgttggtgggactgtaaactagttcaaccattgtggaagtcagtgtggcgattcctcagggatctagaactagaaataccatttgacccagccatcccattactgggtatatacccaaaggactataaatcatgctgctataaagacacatgcacacgtatgtttattgcggcactattcacaatagcaaagacttggaaccaacccaaatgtccaacaatgatagactggattaagaaaatgtggcacatatataccatggaatactatgcagccataaaaaaggatgagttcatgtcctttgtagggacatggatgaaattggaaatcatcattctcagtaaactatcacaaggacaaaaaaccaaacaccgcatgttctcactcatagatgggaattgaacaatgagaacacatggacacaggaaggggaacatcacactctggggactgttgyggggtggggggagsggggagggatagcattaggagatatacctaatgctaaaggacgagttaatgggtacagcacaccagcatggcacatgtatacatatgtaactaaccggcacattgtgcacatgtaccctaaaacttaaaatwaaaaaaaaaaaaaagattaccaatgctaaaaaaaaaaagttgggatgaaccccacttgagttattttctcttttagaacatcatacctaattatatatgggagaagggagaacagtcgtgtgagtaatagcattctggggtacctagggaatctagaccatgttgtttataaagtacttaagttttcaaatgaaaatttcatttttcagagtgacatatttgtaaacactttttatgttaagcaaaaacagatgagatatcttagataatttttcagtttagcccccctaggaattcccacattagaggcatactagaatgaaaatctctctgggtcactgtgtgaactttggttctatgagggacccacagttttgtatctccttggaaatctggattagttctggcttgggctttgagagttgatgtggaatgaatttgtaatgcactataatacatgaatgcaccatgtacgattgaggaatctcgtgtccatacttaaaaggagtcccttggacttccgtccaatcacattaaacacttagatttatctccattttcttcttttacacctctaaaacaataataaggaattaagaaatatataaactcaagaagtcaaagatgataggaaaataggccacagtgggtgaaacctattaccagacttcggggtgatagaaagtgagatagagaagtggcagtgacttagcagaactgagaaaatagaaagtcagtacttgtaaaggggtacgcaagtcccataaaagctctggaatcagaggcaccatgtatactgttcaaggagggatacagaaagaggctgaaacagaactagttggcagcttatatatggaacagttaggcactcaagtccccttccctatgccaagaaggagayagatttattctctgaagaaactggttctgactcaagcacacttatttctacagagactacaagaaagggtcccatattaaaaatggagatggagtgaaagtcggcgtagtaaatggtacaatctgcagccacttccacttgctttattctaagaacagtggcagccagatgtatagttgaccctcatcaaaagactaggtgattctattctagaaatctgattggttccattgaaaagtcctgcagatctgacagttgagatttctccctagtttctatacaaggaagtccaccaatcaacaagcaagcctaccatgtacatagaattttcattcagctttttagtgattcattgttaaatatgaatggtcagctaaggattaatatacttttaaaaaatgacaaaaattgaatatgtttatcatgtacgacatattgttttgaagtatgtcttcattgtggacttgataaattgagctgacctgtgtgttacctcacatacttatctttttttgtgatgataacatttaaaacctagtctttcagcagttttcaggaatacaatatattgttgttaactatagttgccatgttgtaagacagatctgttgaacttattcctcctaagtgaaattttgtattatttgaccagtatctccccagcacctgcagccaccattctactctctactggattagcagacatttaagggaaacctctaccatgaaagatagaaaccaaataagcaaaatagggaagaaaagaaaagaactctgggaaaacagggtaactgcagtaaacagagggtgattttaaaaatcaaagcaaaaaaatatattgtatctttaaagtaataataggattctgttttttacaatcagcacatagaggtcttgaaaattagaaataggaacaaacaaaaagttaaaatagaaatagtgtaaatattttgtggcaggcatagttgtaagtgctttatatataatctaatgccttcaggcctgatgacaaccttatagagtggcggcaatagccccattttacaagtgaggatattaaggcaacagagagtagacatatcaggattttaaccctggsagtttggctcatattctttttttttaatccaccatgccttaatatctccaaaaaatatgataaatagagagaagatccagaaacaatagagactcagtccagggaggtatactctcagcctaatggatattccagaaagaaggagaatggcgtgaacctgggaggtggagcttgcagtaagctgaaatcacgccactgcactctagcctgggcgacagagcragactccgtctcaaaaaaaaaaaaaaaaaaaaaaaaagaagaggaaagaagggcacttactaagcaaataatatactaagacatttcccagagccaatgttcatgaatatccagtcaaaatagcacaaaaattttctgagaasggaagaaaaacacccttactaagtacctgcactatgaaatttcagtgcatcagacgtaaagagaaagtcttaaaactttcrcagagacacagcaggccacataccagagtttagaagtcaaaatgacttggctcctcaatagctacattggcaattataagacagtgcacgttagccttcataattttgagggaaaatgatttctaacctaaaattcgataaccaaacttttttttttttttctgagayggagacttgctctgtcgcccaggctggagtgcagtggcgtgatcccggctcactgcagcctccgcctcctgggttcaagtgattctcctgcctcagcctccccaggcagctgggggaccacaggcatgcgccaccacgcccagtcaagtataaagggtagaatgaagacatttttccaacttgcagggtcacaaaacttgtcactcctctgcatcttttctcagaggctgccagaataaggacatctaccaaaacaagtgcctaaaccaataattatcaartggggtgatttttcactcaggggacatttgttaatatatgaaaacagttttagttgtcataactggggggtggggtagtccagtggatagaggccagggatgctgctaaacacccatacaggacagaaccccatatcaaagaattatatggcctatgtcagtgtgtgccagtattgagaaaccctggtctcaaccaaaagagaatgtgatgtgggacacaaaacgggctccaaatgggagaagaggaaagggaaggcccaggatgatggctctgcagcaacaccggagaacaaccagcccagctagaaaccagtagattacctgactgtctggaaaacagttttgaaaatgatttgtagatttgttgttgtttgatttgtagatttttaaggagagtttgggaagaattaatgctaaggtcatagaacactaagctaaatgaatgaatgaatacatgcgtacagttttctaaaggaaaaaaggtgaacatgtgaaaaataaaaacactgaatattgatgtaaccagaaattatgacataatgtgccacagtgtgtagcattatgttagcataaaagtactaaatctttatcttccataataagaatagtaatatacaattagggagcaaaaataaatataaacatattatttagaaaaatggaggcagacaccaggaaaaacacctagtgagaagagtaagaagttacctctaaagagtagcactcaatgtggggagctagtagggcaaggatgtacttttttgttgttgttgttgttgttgagacagggtcttactctgtcacccaggcaagagcgtagtggcatcatcatggcccattgcagcctcgacctcctaggctcaagcaattcccccacctcacccccctgagtagctgggaccacaggtgtgtgccactatgcctgactaattttttccttcatttgtagagatggggtctcgctatgttgcctaggctggccttgaactcctggtttcaagtgatcctcctgcctcagcttcccaaagtgctgggattgcagacatgagccaccacaaccaacctgtactcttttcttgttatgttttatagaactatttgactttttaaaaatcagacattttaattctttggatgtatttttctttctaaagcgtctccttttccactagatatctacagtttaatatcagggttatttattattgattgtaaaagtcttaagagtgttagatatggtctcttctcacctggctcagtgggctataaacagagggagaagggctcagatgtggatggrtatagttcctgggggtctaggactatggaggttttgcctttatatttggaacccaccagaaaaatgaaggaaattaaatcccatttgttttccagctcttccacattgactttggacatattcttggaaatttcaaatctaagtttggcattaaaagggagcgagtgccttttattcttacctatgatttcatccatgtcattcaacaaggaaaaacaggaaatacagaaaagtttggccggtgagtactgcccttgtgycaaggctgaacacttctaacattttcttatctgaccaggtggaccagcatttcttagctgagatatatttggatctgggagatattcagtctgattataggaagcttttgggggaatttgcctgtcagattattgtgctggttcagaaattcccagataggagaaacagaatgctagaaatttaaaatarttattatattttattccaataatatactaccttttacctgtttcagaacattctctgaaactattaagacagttgataggaagatgctgaaaagacatctgctgtcattgtgtatggagtacagtaagggaactagaattcagggcaaattttttaatctctgatctattactggctacctacatgttcccaagcataatacttgtctttttgcctttgtatcatcttaaaatggggacaaaaatatgaaattaagggctactatgatggttagagacatatcatgtaaccaacacatacttaacaaatcattgtcactatcctttatagttctgtttgggtttctgcagaatatacctcagtgggtctagttttctctttggcaaaataaggggatacgattggatggtcctcagcctggcgcggtaggtcatgcctgtaatctcagcactttgggaggccaaggcacacagatcactggaggtcggagtttgagaccagcctgaccaacatggtgaaaccccgtctctactaaaaatacaaaaagtagccaggtgtggtggcacacgcctgtaatctcagctactcaggaggctgaggcagaattgcttgaacctgggaggcagaagttgcagtgagccaagatcacgccactgcactccagcctgggagacagagcaaggttccatctcaaaaaaaaaacattggatgatcttcttgagggaccatcttgaagaggagagagagggaaggcaggatgacaggaaggagcaaaagcactgacactgattgaggggacttttaaaaaattagtttctggaatcagaccacaaatatagaacccagaagtatgttcagaaatccttgtggattataattataactgatttaataatcagttcttgtgtctcatagaattaaaaagtctagattattattaaaaatgtaatagcctttcrtcatagaatttctatttagttttgtttttgaaaaatatatctgtgatgttagagagattgattgttttatgtagattttagtcctgggacaattttcgcagaagtaaaaatcagaaatgaacctttagttcagtaggaattttcttattctaatagaaagtctagctgtgttttcttaatttcctgtatgaaatgtgctctctcccctctaacactgtgctcatgtggtttgctgcatcacccaaaggttccgccagtgttgtgaggatgcatatctgattttacgacggcatgggaatctcttcatcactctctttgcgctgatgttgactgcagggcttcctgaactcacatcagtcaaagatatacagtatcttaaggtataaaaccacttttccttctctcttggactttgtgggcattgagctcagttttagctgcctgttttattcaagtggctgaaggaagtagaacaaagtcatttcctctaagatggttcttagccaggagggaaagaatctgggaagtacataaaggaggaattttgtagagtagcttgtaacccagaagattttcccatcagtagaaggggcgtaaagaagactggtattgggctgtagccttcttactcacattactgaaagaccgcagatcaggagcgggttgccaccttgattttccacagtctgcctttttcttgccaggatcttagtaggtcttgagtcatcttactggatttgggtggtagtggcaagcagctgtgcatcctgcagtaattataaattattttcatcttcaaaaaccttttggaagaagtcatattatctccctatcttggggttctgcctcctgcagatgatatttaaataagaacatgaagcatgctgcctgatggtggctggggaggcacaaccaatccagcctcctgcagactttgatatttgcacatctctactaaagttatataaaatcatattttcccccttccattttaggactctcttgcattagggaagagtgaagaagaagcactcaaacagtttaagcaaaaatttgatgaggcgctcagggaaagctggactactaaagtgaactggatggcccacacagttcggaaagactacagatcttaacgatcagccttcgctcctaatgtatttgttggtttcatttcattttcattttgcacttgcactaaattgaacatgaccctgttagagatgttataaagggaatgaaatcctggaactcagagttaaattaagaacaaggcatcccacagaacctaatctgaacaatccccgatgattccctctgctttttgaatgcttccaagacttatcatgaaaactgtcaatggataatcatttcctgctgactttgcacgccaaggaatgctactagggattgtttccgtttttgtttgttttttctaatatttggtacttcccagaatggtgtaaatacttcttttcaatgttgtgaccaagtattgtcactcagccaacaacttttccacacctgggggttggtggctgttcttactgtccaaatgaagctaaaaagaaaggcatctttcttcccttttaaaattgtgtaaactgcaaattataatataatttgaatttatgattattttccagaagaaatcttgtaaacctgtggatactcattaattcttttgttaatatttatttccatgatagcatcattccagccagacttgctgaaaatctactggtgaggcaaatataatatatataaatatgctacatatatatttataaaatttctagtgggagttctatataaatgtttctttggtattcttcagcctgtgatttaaagttttacaaaaagcagagctttttcctaagttacttttcagttaggtaactgtgtgatccagttcttccagctgcttctataatgaggcacatattaatacagtttttatatggtatctatgaaagagttcacttcatagagaataatacttgagcaaatgtatccaagaaagcaagcaaatgaaaagaaacctatttatggaataaactccagatctgaaattcagtattttagaaaaatgccagctcttcttactgtatttattaaaacttgtaataatgtgatttttttcaaggatattagttcaaattgaaatggtttcacgccacacggaaatctttaagttatttgttgaggtaccatatatttagggtgctaggggcaagtaatgttaatatgtgcaataggaactactggtttgaatgtgtaaatgggtgatctctctgagtcctggcaacatccagcaaaactactgcttattctccaaagaatattgggagctctcaatcctcggtgatatgggaaagagaactgagtatttgccctatgactgagctttctataggaattttattaaagaatgtttaattttgttgtccttcttaatgttctcagtcaaataaatgagtgagctggtttcggctgctcttggaatgggtgagcctcttctttatgggtagactgggcctttggaacttggcactggaactccaagaaatggccaagtcagtagacaaaccaacctcaggaataggctaaggcttattatggcctcttccctgacttctccccttgtttcccagcctcatcaggcatggtataggaggccccctggactttggtgggagcctgaggtaaggagccatgcatatgggaggtgtcctgaagtctgggtagttacttggcactgagccaaggccagactctgctgctttggagctcttgttcatggggcagatgctggagcagtccagttccttggaaataactcagctgaggatgggagttggcccctgaattcctcatttccagggctggtgtagactcactgagacttccaggaatagaactatggaaggacaggtttgttcagagatctttgtctagtagccacccaccatttcatgaaccaggccgcaggtcagtggtttggagaatggtgaacactgccaggaagaaatggataccattctttccagaggggtctcctcagccaaaaggagggccttgataaatacatgccaaatcagtgaagttcaagtcaactgtttttcccatatgggcaccaaattgtatctttcctgttttctttgaagggttaagtaacgtgaccatagtcacagagtagttgatggagccagtattcaaacccagaaagtaagaagcctattttaattatctgtgctctttactcacaatgcctcagtatacatttcagatttattgggttccacaaatagaaayctatggaaattttgaatcaaattgcattaagctatagacaaggttgagacaaattgacatctccagaatattgagttttccaaaatatgtaagtggagtacccatttatttagattatctttcatttatatccgcaatgatttatagtattctgtgtttacatattatgcatcgtttgttagattcctgggtaagtgactttattgtaagtttcattgttgttaatctatagcaatcattctccaagtgtggtcccctgatgaggagcatcagcatcaccagagagaactggttaaaaatgcaaattcttaatttttaatttttgtgagtacatagtagatatatatatgggatacatggaatattttgatacaggcatataacatgtaattatcgcatcagggtaattggggtatccattacctcaagcatttatcctttgtattagaaacaatccagttatactcttttagttattttaagatctataattaaattatcgactatagttactctgttgtgctatcaaatactagatcttattcattcttactattttttttgtacccatagaaatgcagattcttggtggggcctggcagctcacacctgtaatcccagcattttgggagggcgaggccggggaatcacctgaggtcaggagttcaagattagcctggccaacatggtgaaacctgtatctactaaaaacacaaaaattagctgggcatggtggctggctcctgtaatcccagctactcgaaaggctgaggtaggagaatcacttgaacccaggaggcggaggttgcagtagccgagatcacaccactgcactccagcctgggtaacagagtgagactccatctcaaaaaaagaaaaaaaaaagaaatgcacatccttgagccctgccctggagctactgatttagaaatgggggtggagcccccaaacctgtatttaatttaatttatttatttatttattttttgagatggagtctcgctttgttgcccaggctggagtgcagtggtgtgatctcgattcacttcaacctccacctcccaggttcaagcaattatgtctcaacctcccgagtttagctgggactacaggtatgcaccaccatgtccagctaatttttgtatttttaataaagacagggtttcaccatattggtcaggctggtctcgaactcctgacctcaggtgatccacctacctcaacctcccaaagtgctgggattataggcatgagccaccgcacccagccaaacctgtattttcataaagttccagagcaaaggtccacaaatacatttgatgtttgtatttagcagacttataaactttctaattaatcctaacaatttatttgtatgaatttttttttttttttcttgagacagggtctcactatgtcacccaggctggagtgcagtggcgtactctcggctcactgcaacctctgtctcctgggcttaggtggycctccgacctcagcctcctgaatagctggggccacaggcatgcaccaccacacgcagctaatttttgtttgtttgtttgtttgttttaagagacggaggtttaccatgttgcccaggttggcctcaaacttctggactcaagcagtctgtccgccttggcctcccaaagtgttgggattacaggcatgagccactgagcccggcctgtataaattattttgattttgtatgtatcacctaaaaatactgttgatttttttttttgtggattttttttttttcaccatgatacataatttagtagagacacgaactacccacacggagatgattagcatcacacagcactttaagcagatattggcaacacttgaactcacaatagcaatgagaggtggctacgaaattattaaagtagtatgtcatgtactacagttaattttatgcagttatgttttaatactgcatttttgtgttcctatttttctctttttaaattttttttttttacttttaggtttgggggtacatgcgaaggcttgtaacataggtaaacttgtgtcacagttttgttgtacagattatttcatcacccaggtattaagcccagaagcagaaaagatagctattgagtactgggcttaatacctgggtggatctcttttatcagactaaagaagctaccttagctttctaatttgctaagggactttttaaaaaattattaatggatgtggaaatttatcagatgatttttctgcattttattccaatgatcataaggtttttctcatttggtgagtcatgtttcaatattaaatgaagtttgcattccagcaatgagccaaattgattgtaattttttgttgttgtttgtttcttcaagaaggagtcttgctttgtcccctaggctagagtgcagtggcgtaatctcagctcactgcaacttccatctcctgggttcaagtgattctcctgcctcagcctcccaaatagctgggattacaggtaactgccaccaagcctggcttattttttatttatttatttatttatttatttttgtatttttgtatttttagtagagacatggtttcagtatgttggcccagctggtcttgaactgctgatctcaaatgatctgccagccttggcctcccaaagtggtgggattacaggcatgagccaatgtgcccggctgattgtgaagtgtttttaaatgtgtattcctggatttgatttgctaatatttgaggggtttgcatctttttttttttttcaatcagtggtattagcccataagttccttttaagatctgtgtcaagttcttttaggcaagatgtaaccaacatggctgatgaggtgcctggcactcacctcctccactaagtgggaccaaagcagcaaatagataaccacacatcaagtagacagagagaacactagaattcaccaggaaagtgacagggcacctctgaggtaaagaaggagagagaaacaaagaagcacccagcccagctggaattggctcagagctggaaggaacttgccattactaggaaaaggtaagggggagattcccaatagtccacattcccaccagggwtgcctgcagtcctagccaccagagagccccttggccctaacaggccctgagcctagtataggttgctgcttggagttcacaaaactgcattgttcaagaaagggaattcacactggatcccactgaccgccaacacccaagcaactgcagcatggtgccattttgagagctcagtccccaccagactacatcctccctgggactcaacagcccctgcatctccacattcctggagccccactgacatcctcccaccaccacctagagggctgcagcattgcaatgccagctggacccagtgctatggccagttcctcagcactctagcccacaaggtaacctacaccctagagaataggtggtgaagcacatcagggaggctgccccaaggacaaagagggccaaagtgtacattccctgcagcttggcagctgacttcctgagactgctgccaccaactgcaatcctgcccttccagcagcagggccacctcatacctgtacatgctgtgaagaggcctaaggaacaatcctccctcacacactatccaagggtgtgaggacagacctgccaagtccactcatgctgccagcgcctgcatgcacctctggggacctaaggacaggcccaacccacccatcactgccattgccaacacccacccatgcatgccacctaggagcctggagactgggctgactagcccattggcacctccgctggcactcatgcataccacccaggggcctgagggccagcctgttgacattactgccacagccaataccacaagtgctacccagggccctgaggacctgcctgcctgacctgccacaaccactgccagcacttgagcctgccacatgaagtacaccacccaggcgactgaggactggcccacctacccttctgctgctgccactggtgctagaggactgactggctcacctggtttccctatccccagtgaagtccgactacaacgtacataacctcatcttattgaagacaacataataagacaagataaagcagaagaaagaatttctgaactgaagacatgttttttgaaataagacataaaaaacaataaagcaagccatgtgacatatgggacacaaaagaacaaaaattcaaatttggggagttccaggagaagaaatgggcaaaggtatagacagcctatttaatgaaataatagctgaaaacttcccaggtcttgctagagacatagacatttggaagctggaaactcaaggagtcccaaatagattcaatctaaagaggtcttcccagagacaaatgatagtcaaactgtcaaaagtcaaaaacagagaattctaaaaacagcaaaagaagcccaaaatctccttaagccgataagcaacttcagcaaagtctcaggatacaaaatcaatgtgcaaaaatcacaagcattcttatacaccaataacagacagagagccaaatcatgagtgaactcccattcacaattgcttcaaagagataaaatacctaggaatcccacttaaaagggatgtgaaggacctcttcaaggagaactacaaaccactgctcaacgaaataaaagaggacacaaacaaatggaagaacattccatgctcatggataggaagaatcattgtgaaaatggccataccgcccaaggtaatttatagattcagtgccatccccatcaagctaccaatgattttcttcacagaattggaaaaaactactttaaagttcatatggaactaaaaaagagccctcattgccaagtcaatcctaagccaaaagaacaaagctggaggcaccatgctatctgactacaaactatactacaaggctacagtaaccaaaacagcatggtactggtaccaaaacagagatatagaccaat

SEQ ID NO: 93652 - DNA, 25769 bp, Homo sapiens
  misc_feature (1)...(25769): n = A,T,C or G
nnnnnnnnnnnnnnnnnnnnnnnnnnnnnnnnnnnnnnnnnnnnnnnnnnnnnnnnnnnnnnnnnnnnnnnnnnnnnnnnnnnnnnnnnnnnnnnnnnnnnnnnnnnnnnnnnnnnnnnnnnnnnnnnnnnnnnnnnnnnnnnnnnnnnnnnnnnnnnnnnnnnnnnnnnnnnnnnnnnnnnnnnnnnnnnnnnnnnnnnnnnnnnnnnnnnnnnnnnnnnnnnnnnnnnnnnnnnnnnnnnnnnnnnnnnnnnnnnnnnnnnnnnnnnnnnnnnnnnnnnnnnnnnnnnnnnnnnnnnnnnnnnnnnnnnnnnnnnnnnnnnnnnnnnnnnnnnnnnnnnnnnnnnnnnnnnnnnnnnnnnnnnnnnnnnnnnnnnnnnnnnnnnnnnnnnnnnnnnnnnnnnnnnnnnnnnnnnnnnnnnnnnnnnnnnnnnnnnnnnnnnnnnnnnnnnnnnnnnnnnnnnnnnnnnnnnnnnnnnnnnnnnnnnnnnnnnnnnnnnnnnnnnnnnnnnnnnnnnnnnnnnnnnnnnnnnnnnnnnnnnnnnnnnnnnnnnnnnnnnnnnnnnnnnnnnnnnnnnnnnnnnnnnnnnnnnnnnnnnnnnnnnnnnnnnnnnnnnnnnnnnnnnnnnnnnnnnnnnnnnnnnnnnnnnnnnnnnnnnnnnnnnnnnnnnnnnnnnnnnnnnnnnnnnnnnnnnnnnnnnnnnnnnnnnnnnnnnnnnnnnnnnnnnnnnnnnnnnnnnnnnnnnnnnnnnnnnnnnnnnnnnnnnnnnnnnnnnnnnnnnnnnnnnnnnnnnnnnnnnnnnnnnnnnnnnnnnnnnnnnnnnnnnnnnnnnnnnnnnnnnnnnnnnnnnnnnnnnnnnnnnnnnnnnnnnnnnnnnnnnnnnnnnnnnnnnnnnnnnnnnnnnnnnnnnnnnnnnnnnnnnnnnnnnnnnnnnnnnnnnnnnnnnnnnnnnnnnnnnnnnnnnnnnnnnnnnnnnnnnnnnnnnnnnnnnnnnnnnnnnnnnnnnnnnnnnnnnnnnnnnnnnnnnnnnnnnnnnnnnnnnnnnnnnnnnnnnnnnnnnnnnnnnnnnnnnnnnnnnnnnnnnnnnnnnnnnnnnnnnnnnnnnnnnnnnnnnnnnnnnnnnnnnnnnnnnnnnnnnnnnnnnnnnnnnnnnnnnnnnnnnnnnnnnnnnnnnnnnnnnnnnnnnnnnnnnnnnnnnnnnnnnnnnnnnnnnnnnnnnnnnnnnnnnnnnnnnnnnnnnnnnnnnnnnnnnnnnnnnnnnnnnnnnnnnnnnnnnnnnnnnnnnnnnnnnnnnnnnnnnnnnnnnnnnnnnnnnnnnnnnnnnnnnnnnnnnnnnnnnnnnnnnnnnnnnnnnnnnnnnnnnnnnnnnnnnnnnnnnnnnnnnnnnnnnnnnnnnnnnnnnnnnnnnnnnnnnnnnnnnnnnnnnnnnnnnnnnnnnnnnnnnnnnnnnnnnnnnnnnnnnnnnnnnnnnnnnnnnnnnnnnnnnnnnnnnnnnnnnnnnnnnnnnnnnnnnnnnnnnnnnnnnnnnnnnnnnnnnnnnnnnnnnnnnnnnnnnnnnnnnnnnnnnnnnnnnnnnnnnnnnnnnnnnnnnnnnnnnnnnnnnnnnnnnnnnnnnnnnnnnnnnnnnnnnnnnnnnnnnnnnnnnnnnnnnnnnnnnnnnnnnnnnnnnnnnnnnnnnnnnnnnnnnnnnnnnnnnnnnnnnnnnnnnnnnnnnnnnnnnnnnnnnnnnnnnnnnnnnnnnnnnnnnnnnnnnnnnnnnnnnnnnnnnnnnnnnnnnnnnnnnnnnnnnnnnnnnnnnnnnnnnnnnnnnnnnnnnnnnnnnnnnnnnnnnnnnnnnnnnnnnnnnnnnnnnnnnnnnnnnnnnnnnnnnnnnnnnnnnnnnnnnnnnnnatattcaggaaggcccttactaccatgactcaccattctgaatccataaaagtaaatttgctatataaacatcaaaaaatatttccattcacaaataacaccattagcaaaataaatgactaatgaaaaccatggagaaaatattcaactcatataacagcaaaaaagttaataatataaagtgagcttgtagaaaccaagaataaaaaggtgcaactcattataaaaccaggcaaagtatatgaacagatagttcacaaaaaagtgaactcaaatggccattaaatataaaaatttctcaccctccctcataataaaagtaatgcaagtgataattttgctgaaataacttttatgcacctgtcttgttagtcaaatacaaaaggttgtttttttctttcagaaaaaatagtttaattatcacaagacatcttagtggaaggatgggaaatatttctcaaatctgcccccttgaaagctcagagactagggttttcaaagataatttggagggcagggggctaaggaatgggtgctactgattgcttgggaatgaaattatagagatgtgagaaatgtcttcaagtgctgagtttgtttctgggtgaggcagacacaggacaggtaaagtcagttccttgctgtagaatcacaggtctaggtagtgtcagtaacttttccagaatgcaaatgtctgaaaaatatctcaaaggtcagtcttagattttacaatagtgatgttaactacaggagcaactggtgaagttacaaagtgtgacttctggttacatgactcctaagcagtaagcaagctagggaacaatggctggttattgcttaactatgcttatagcttagcagaattgaggcccctaccatctaccataattctaatgctgtggaattgcattaatttcacaaaggggtttaggtccctgaacaagaagggagttggtttcaggaagagactgttgtcatccttgctttaaagttaaattataaactaaattcctcctatagttagcttggtctatgcccaggaatgagcaagaacaaaatacaaatctttaacaactctattagcaaggctgtgaggaaacagacactctcatgtgttaccaaaaagtgctataactctgatggaggcaaattttgaaatatctaataaaattgctaacatgttttgtttttgattttgcatcattactctcaaactatgatctgagaacccctgaggatacatgagactctttcaggggatatgcgaagggtctattttacaataaaacagagaaattagaacccttatgcatcatgatgggtatgtaaaatgttacagctattatggaaagcaatataacattttctcaaaaaattaaaaaatagaattcccattcagcaattccaactctgggtatacaccaaaaaaaacttaaaatcagggtttctgaggaatatgtgtacactcatgttcacagtagctttattcacagtagttggaaggtcaaacagcccaaatatctatcaacaaatagacaaaaaataaaccatcattctcagcaaactatcgcaaggacaaaaaaaccaaacaccgcatgttctcactcataggtgggaattgaacaatgagaacacatggacacaggaaggggaacatcacacactgggcctgttatggggtggggggaggggtgagggataacattaggtgatatacctaatgttaaatgacgagttaagctgtgcagcacaccaacatggcacatgtatacatatgtgacaaacgtgcacgttgtgcacatgtaccctaaaacttaaagtataataataaaaaaagaaatatcaggcaaatccaaccaaaaaaaaaagagaatattgtatttttcaatgtgagaaggacatgagaattggaagggcaggagcaaagtgacatagtttggatatttgttttctccaaatctcatgttgaaatgtaatccacagagttggaggtagggcctggtggaagacatttggatcatacgggcaggtcccacacgaatgacttagcaccatccccttcgttatgagtgagttcatgagagatcttgttgttttaacatacatggcacttccccacgctctctctcttgttcctgcttttgccatgtgatgcacctgctcccccttcaccttcttccatggctgtaatcttcctgaggccctcaccagaagcagatgccagcaccatgcttcctgtacaccctgcataactgtgagccaattaaacttttttctttataaattacccagtgtcagatattcctttatagcaatgcaagaacagcctaatatagtaccttatataaatgaaatcacacagtatttggttttttgtgtctggctaatttcacttggcatgtcttcaaggtttatccatgtaatatatgtcagaatttccttcctttttaaggctgaaataatattccattgttatgtatatgcaacattatctattcatcaaacattcaggtcaaatcttgaatgctctgttgcttaaaaatttcttctctcagattccctaagtcattactcttacgttaaaacttccacagatcactaggctatgaacacaatgcagccaagttctttgctaaaatataggaaggaggacctttgcttcagttcccgaaaagttccttatttgcatttgaaatctggtcagcctgcatttcattgtccataattctatcagcattttggtcacaactatttaaccagtgcctaagacgttccgaacttttcctcatctttctgtctcttctaagccctccaaactcttcgatttcttcccatgaccwagttccagagttagttctacattttcaggtatctttacagcaatatcccacttctggtaccaattttcggtctcagactgttcttgtgttgctgtaaaggaatacctgagactaggtaacttacaaagaaaagagatttaattggcccaaagttctgcacagtgtataggaagtgtggtgctggcatctgcttctgatgagggcctcaagaaatttacagtaatggtggaagatgaagaaagagcaggcacaataaagggcaagatgaggagcaagacagagagtgagaaggtgccactcacttttaaacaaccagatcttatgatctcatttatcaccaaggggatggtgctaagccattcatgagggtcccacccccatgatccaatcacctccyaccaagccccacctctgacattggggattgcatttcaacatgagacttggagaggacaaatattcagacaatatcatgtatctagaatagtcaaattcatagagtcggaaagtagaatggtgtttatcagggcctaaagggagaggggatgacgggtgattgtgtaacggggacagagttttcattttggatgatgaaaaactcgggagatggatggtggtgattgttgcataacaatgagaatgtacttaatgccactgaactgtacactcaaaaatagttaaaattggaaatgttatgtgtatttttactacaaaattaaaaaaagtaaatagatagagatacatatataaataaatctaaagtgatattttcctttttattctaattctttcacgagtatacaatagcattttccagaaggtacatgttggtactcacaacagagtgaatgcagaatcagatgagaggatccaatgtttttctactaagacgttaaagggaattgcagaataaatagacgcaataaataaataaaataatgccactttcctcattattttttcattttgaaaagtttactttatcattataaaaaaattatgcatgctaatatataatgggtttattacagttatttctaaaagcatacatttacaaaaattctgttttaatatctactatggtagatattgacagatataactcatataaataacaagtctttagaattttcaataccttttaagattgtatggaggtgctgagataaaaaaccttactaagcaccaacttggcaatcccaagacttggaatttatcctacctgcttgtgtaccaatgccccctgatcaacagggcttctctttcctcaggctggcaagcgacycccaagcccagccctgtggtgggtgaatgggaaggggaagraattaatgtggaatttcagagaactgagtgaaaacagccagcaggcagccaacgtcctctcgggagcctgtggcctgcagcgtggggatcgtgtggcagtggtgctgccccgagtgcctgagtggtggctggtgatcctgggctgcattcgagcaggttggtaactgactacctggacagagaactgtcttccttgtgaagaaaactgatagcagagaaatgcagccacctctctcaaaagaagtctcctccttggagcatgctgtcctgtatcatatgaagaaagacatctccctacttccacttatttaagcaaactatgtgccaagcacttatgcagggtgaacaacaacaatgacatagtttacatattcatgggacttacagaactttggagaaagctcttaaactattaattgcacatgtaagtatttaatcagaattatgataattggtatgagaattctattaaaatctataaaaataaatttggcagactgtgacctgcaggccaaatcctgcccaaagcttgtttttgtaaataaagttttattataacacagtattatatgtggctgcatttgcactacagtggcaacttgagtagttggaacaagagagtgtcttatccacaaaacctaaaatatttactatttggccctttgcagaaaaagtttgccaatgcttttctaaaagaagacttgaattaaccaatatgaggagcaactaagtctcaatggaagtgatatttgagctgagatctgcaggatgagtaggattttgccaagagatagagaggcttgtgccaagcaaagggaacagcatatgtgaagatgtaattatctgatgatttcttcttgtccacttcccagaaaagccaaacactgaaaacagtaggagttgyrgtagagaagagtttaataattgcatagacagccaagttgaaggatggaggatgtttcttaartccacctccccaggaaatcagagactagagtttttcaaggatgctttggcwtccaaggggctaaggaatagkaaatgctgattggtttggctggggatgaaaacatgggttgaagctgtcttcttgtgttgagtcaactcctcagagatcacagaactagttgagttagtttcttggtatcagttactgatctgggtagtgcaagctggtccatcagaatgcaaggtctgaagaacacctcaaataccagacttagggtttaccataatgatgtaatctataggagaaattggggaggttacaaatcttgtgacctctggctccatgactcctgaactataattctaaccttgtgacaaatttgttatttttctaaaggcagtttcaatctccaagcacggacacagttagtttcaggaaagagctattatcatttttattttaaagttagactataagttagatttctcccatagttagcttggactatgtccagggatgagcaaagatagatagcttgtgaggttggaaacaagatgaagtcagctatgtcagatttccctcagtgtcataatwtttccaaaggcagtttcaaagccacagaggagggaaacttgaaaattataaaagaacytaaaaggatatctatgtgcctgaagtccaggccataaaagaaagtagtggcaatagaatgaacatgtagaggtggccaggtgctaaactggcagtgccttgtggtccttggtaagagttgtggacatttatccagtggtgaatgggaaatgattgatggattgagtgacactcaaaccattgatgcattgagtgacactcaaaccattgatgcactgagtgacatgatcatcctctgtttggatggtcatattggatgctcaatagggaatgggatgaagaagacaatagtggggttggaaatctcagataagaggtgaagcgatggtgatggcttcagtttcgttgaggtagtagagatggagataagtggatttaacaggcaattggggggtgaactaataacagggttattcaaaggagatgcgagggagagagagagaagtacagacatttcagcaagtgggtggatggtgctttctttcactggagtgaagaacacagatatagaaagaggtattagtgtgttaggaaaatatcacaagttcaatttgggcatgttgagtccaggatgtccatgtgatgttcaagaagtgataacaagttggatttaaggctctaaaatttgacatggagacagaaatttgagaatcatcaacttttacattaaaaggatgagaagtacagtggtatcaaaaagaaccccaagaaactccagcaacctccttcacaaactgccctttccacctctgcttgcacacagcctaatcccaactaaaagctccaacccacctcatattctggggacaatgggctgagcatgagaaagcaatgggtaaagagaaagacatgaatgcagccaggaattagaaactatcagaggcgaccaaaccaaytgcaggaacttggaagcctgtggaaagagagaacaagccagagagaaaggtgacatactgaaattatagccagaaggaaaggagaacccagaggaagagatgtgtctattgttctgtgtctgactcaattggccaccatggtagagaaacatttgaggatatttacaggtatgcagtgagaatcccaaagtgttgagagtgggaagaaagtgagctaaggttaaaagctatttaacaggacaggcatgtggtttaagcttcacaaaaaatgaaacctgtgtagttattctgttcttttctttctttcttttatttttttgagacggagtctccctctgtagtccaggctggagttcagtggtgcaattttggctcactgcctcccaggttcaagcaatcctcctgcctcagcctcctgagtagctgggattacaggcgtgtgccatcaagcccagataatttttgtatttttagtaaagctggggtttcgccatgttggccaggctggtcttgaactcttgacctctaataatccaccctccttggcctcccaaaatgctaggattacaggcatgagccaccatacctggccctaagtctagttattctacagaatattttaataatcaaaggagtctcattaaaataggaaacaagaacaagaatttaggaaagtgataatcatggggtataaaacctcatttatgtgcaaggaataagtctaatgttttaagataaattgtacagcatgctaaacacagctaataattcagtactgtaaatttcagtatcattaagagcaaaactttctaatgttctcatcacaaaaaaatgttaaatacttgaggtgatggatatgtgaattagcttaatttaatcatctcacattgtcttcaaaaattataataccactttgtacccaataaatatatacaactatactttgtgtgtacatagatatgtaaaactgaaggcactctcatctaagaaaaatgcatttaatgtcccagggatgaaataaattgccaggacctagagctattggtgtttcaagaccatggacagttccaagtgcctttcctcatgattctttaattatcatatgagagttttgaatacagcaaactcctgtagaaaattttttttgaggggtgagagtgggtgaggagaattgtatgtgtcttagactrtcaacartgtgacattagcaattcaatttcttttctttgtctcagtagggcccttaagactctgacaacccagggaatcctaggtttcattcactcccttgtccttagttcccttttttattgacactctctattggtcattacttcctcatcctctccttccccacttgctcgctgcttgatgtttatctcaggcttctctagggacaaagaaaatcatcctttccaattctctaaaytgttggcttctttaggtctcatctttatgcctggaaccatccagatgaaatccactgacatactgtataggttgcagatgtctaaggccaaggctattgttgctggggatgaagtcatccaagaagtggacacagtggcatctgaatgtccttctctgagaattaagctactggtgtctgagaaaagctgtgatgggtggctgaacttcaagaaactactaaagtgagtatctacatgtctcagcctgggttttaactaaaactggaaacagagccaagcacttaggtgcaggtgctttattgaggaggtgcagaaagaacagcatgggactaggaagagtgaagctgggaagaaataaaagctaacacaagggtatttttttttttttttttttttttcaaatcattgcaaggactaaatggggcttgatctgcctggaccttctgagcagcatatagaatgcctcccaggattgtcctctaaaggattgaaaagcactgatccattagcatctggtccccacaggttcagggttgtcctgggggtgttattgcctccacacttctgggctgcgcactcatgcgtgaagagtggstcagagttccatgctatggtaaaacagagaaactatggggcacaaagtgaatcacttgtgatgcacactggaaacaacatgatgttaacaccaagtgggttgaaacccacccagaacaatttactggaactatgactcaaatcaggggtgaggccaaggtcatgagggaaaacccaagagatggctgatataccaagtttctgggctcttctttccacctcttgtatctctaagagaggctgatcaagggcagaggwctttccatgtgttgatagcatggaaagaccttgatagtccttccaaaagccgatagcaagactggctggattaatgattttctctgtcaacatgtctgaaatccctctagcaggggcacatatgataggaaacttgaagggataacttcagcttttcctttctaatgccatggtctttaaggtagctgtcatggaaataaacaccatcatgcctgcttttaaaggctcaaaatcaggacactggagatgtccaagagatatgtaggtgcttccagggaatagaagagaatgccaagaaagtacttggaaaacttgtattaattccacccctcctgtccacttggtgtcatgccagagctcttcacaacaattagattagcatttattgagttcttactaagcaatttgctcatttctttggtggtagagataactctataagacttgatctcactttttttgcagatataaagtcagacacagagacgttaaataagtagtttaaggttgcattgataacaaagtgtgaaacttcagtagttttcaaacccaactctgattgactcagactcccatgatcttaatcactcagcagcctctcttgtgaggtgggtccatcaacttgcccttttcagcacagtgggtggtgggaaaagatgggtcactttgatatctggtgtccagtctagctctgaraaaatgacaatctgtgtctctgtcagtgaggcatccaccactcatcactgtgtggagactggaagccaggaagcatctgccatctacttcactagtgggaccagtggtcttcccaagatggcagaacattcctactcgagcctgggcctcaaggccaagatggatgctgggtaagctgagctctttctctctacagagaattacatgagttttggagttagaaggagaatgagacccaattatatattaagtcakgtcaaccggggtcccaccttctgaacattcatctcctgttgatacaggatgtgtggatagaacaacttttcttcccccttcctacttatacatagacatatgcctataaacctgcaggcagatacacrcacacctctgcacacacacctccctttcctcccctacaccttagtgtcccacgcatcctaagcatgcacccacctatatgtacatgtgttttgtctgtgttttcagttggacaggcctgcaagcctctgatataatgtggaccatatcagacacaggttggatactgaacatcttgtgctcacttatggaaccttgggcattaggagcatgcacatttgttcatctcttgccaaagtttgacccactggttattctaaaggtaagagaggatccagtttgcagcagttattcagagtgagcccgaggtttgcacacttcaatttattgtagtttgtttcaattcatctaatttttgctaaacccctgccatgtggtgaacagtgttcagtaaacgagatggaaatggtccctgacctcacagagctcatgttctggggtaggagagaggcacatatatagataaaaggagtatgttcaggagaaagatattgtaggtcatttgttcactcaacaaatgtaacgggctcttccgctggtgtcacctatcagatagatgctggtgaaccacgtgtaaaagggaaagctggagtattggaggggatgccatctcgctctcatgagtgtgtgtgtgtgtttgtgagtgcacatttcatttccttttttatttgcagcataacacacaaactgaaggtaaagtacacagagtgccaccatcctatgtgtacagtttgaaaataatttagctgtgttagatactgtcttagtcagcttgggctactataataaaataccatagtctaggtggcttaaataacagacatttacttctcatagctctggaggctgtaagtctgagatcagggtgccagcataattggattcctggggaagccctctcttcctggcttgctgatggctcccttactgctatattctcacatggttgagagagacagtgctggtatatcttcctttttacaaataaaggcactcatgctatcactggggcacctgcttcattaycttkcataattacccctaaaagcccygcctccaaataccatcragttgagggttagagctttaatatagggatttaggtggggacacaacatccaattcatatcagacacccctgtaaacaccaccagataaagacatgaaacattcccaccactgcagaaggtgttcataccccttctctgacarcatctgccccccataagttaatcattcatttgatacctatcaccatagattaattttatctcttcttggaatttcatgtaaatggagccaaattatatgtaatcttttgcatttggcttcttttactcaaaatattctctgtgagattagtccacgtgttgcatgtatcagatgtttgttgttttagctggctgcaaagtatttcattatgtgaatctgtaaaaatgttcccccatcctattgttaatgaactttgggttatttccaatttaagatggttttctagaagcaattcagaagaataaatggaattttttcctgtagaacttgatggtacagccattaagtaagacccacagactgcagctatgcattatcctgtagcaacaaagcaatgaaaatgacctcattttgcttatgaagatacaycctatgttggactctatgatagagggattgggttatttccctgctgtgcccccagatctctaatggcccatccagacatctatttggctgcagcaaaggttcaagctaaggcatagatgacatcttcaaaagtcaaaaagtcaggtgtgatctggattttcataggaaattatcttcaaataatactgtcattctctgttttaagcaaattcttactctgtgtccttctcaaaaggacttgaactggtttttattaagttccaccattaaaaaaatgaaaacagacataaaattataaagcccattgggaaaatttaggttggaggtgtagggtggaaaagactaaggaaattaaggagaaatatagcaaatgagtatgtagttacaagctgagcttctagtaaggcaaagcaataaggaatatgggatcattttcatagcttatatctgtgtatcaagcacacttgaaggaaattattkcatgatactcacatttgtcattttttctagaccttttgcttaaaccattgccatggtttgaatatttgtgccccccaaaactcatgatgaaacttgtaaamcaaaaataaaatcctaaggccccatcccgccagccatctgaatggacttcctccttagccagggttcttttaaaatttaacctgagagactgtttcaggccatgayaggaagtgggagtgggacatgcctcattatacctctctggtattaacatcaatacagactttaagtctgattaaaaaaaaaagattacaacctgttctgtctaaagcctagtgccagtacctaaaagcttcctctgcaaataagaacttgggtctccayaattatttatcttaactaaggcattcctttctattgatcccaggtctttagataaactcaaccaattgtcaaccagaaaaatttaaatctacctataagctggaagcccccgcttcaagttgccccacctttctggaccaaaccaatgtattttttaaatgtgtttgattgatgtcttatgtctccctaaaatgtataaaaccaaggtgcaccctgaccaatttgggcacgtgttctcaggacatcctgagggctctgtcatggccatggtcactcatgtttggctcagaataaatctcttcaaatgttttacagagtttggctcctttcatcaacaaactcaatccccagtgtaacagtagtaagcggtggggcatttaagagatgattgggcctcatgagggattaatggattaatgggttatcmtgttagtgggttagttttggagagtgggtctgttatataaaaagccagttttgctctacctcgtgagcccctttacaatgtgatgccccgaccctccttgggactctgcggagtccccaacagcaagaaggctctcaccagatgcagcttcttgaccttggactttccagcccctagaactgcaagaaataaatttattttcttcataaattactcagtctccggtactcagttacagcaaaagaaaacagattaagacaatactctattacattctgcataaagaaaagcatgggatggagatggtgttatacgacaggaatacatgctgcaaataatgatcccactacttgctgactaggtgaccttggagcagctacttaaccttgtacatcatgggtttcccctctgtatcatgaggatgatagcacacactccgtgaggttattgtaaaaattaaatgagataacacaggacatggcaagtattcagtactaggtctttttgcagcacttgttttgaaatgtctatagatgtctttagcttttcaaagaacttttatatctaaaatatattccaaaaatattttcaggaaaataaggctggaaacaatctattataaagctggctacagaaagttaaggaacttaaccaagacagctgctgtgctcaggcagctgatcttcccttagttgctggggrgtgatctactcctaggggtgtgttaacgagggcaagtcttaaactggcaggaacagacatccaggatttgacaaaaatgtttcaaattagccttagactttttcactacaataatatgtattcatttccctgttatttgtgtcttcagggtgcatgakagttgtggggctcatttaacctgaatcagacatagtaaacaagctagggttttcatccagacctctacaactccatagctcacaattgtaaccactgtgcatagccataagttggcatttgacctggtgaccaatgtctcacctggctcttgtcttccagacactctccagttatccaatcaagagtatgatgggtgccccyattgtttaccggatgttgctacagcaggatctttccaggtgatggggctttgaggattggtaagagagtctggccccatccccctgactccctcacatacattcatgcctatctatctgaatctctcgcacacagagagccccatgaagccatttgcatcatcaaagcacccagaaaccmagtctagkcctgagtggactttggttccagggaggctgagggcaaacatttatttctcttcttcagttacaagttcccccatctacagaactgcstcrctgkaggggagtcccttcttccagaaactctggagaactggagggcccagacaggactggacatccgagaatcctatggccagacagaaacggtacctgttcccaggggaaccatgggctgkgtgcactttttgggcttcaaaattctctttgacaataaaaattgttagccaccatgtatcattcatctattcgagaagtatttattgagcctctatgaagggacaggtactgagtattgaaaattccgcacagaacaaaaaaggcaaagttcctgttttctgggagattacattccagtgagatttggggagagagaaaataaactaagaaatatctagcatggcaggtggtgagaaatgcgatggaaaaagtaaagtagatgacatggggtgagaagttggtaaatcagatatggtagtcagaaaattcctctgtgatggggaaacattttagcagagaccaaagtttatcaaacatgtcaagcactgtacaaagctrcttagactgaagtgaggaatgggaagaagaacccaccatgactttactgcacctcctgacatatcttcttggaactcttgaggtctcatgtgcacaatgtggatttatgctattctatactattttacttatcaaaactacatggggaatacttttccccaactcttcttctcctttttccagtgcctcttacttgtgactctcagcacttcttgcctcttcctctccactctcttaccctgcatccttctttggctaatgagtacccttggaagaacttttgcagaaggttgacggcagctctgtggtatgaaagagccaggaagagctctgcaaatatgaataaggacaatggagttgtggcaagcataccctggcaggggcctcccaccattcagaggaggacatgtttaggatatgcttacaaggacactcaggttcccatgatcttaatcactcagcagcctctcttctgaggtgggtggataaacttgccctttccagcacagtgggtggcgggaaaagatgggtcattgtgatatcttttgtccaggctagatctgagaaaatgacaatctatgtctctgtcagtgaggcatccaccactcatttgttattctgttgggaaggttcatttcagggttcaagcagaactggtgctgccatgggagatactttaaaaagtatattttactgcttgaggaaatggatacttcattcttcatgatgtgattatttcacattgcatgcctgtatcaaaacatctcatatattccataaatagatacacctatgtacccacaaaaattcaaaataaaaataaaagtagtatattttaggccttacagattgcatattggtgatyccatatagtttgaaagggctttgggtatccatagtgtcgtattaaaatgtggttccccctaaaagagattataatgtgattgttaggtcctcttcctggggagtggtagatgggttgcttcctgaactaacaatttagcgaagcccctaggattgtggttccagtaatggggagagagccagggaatgaggagcagggggagccaccaagtgcaggccaagttcaggacagtgtcaggacctgctctgcagaaattttttctttttctgtgaccttgtacctcctcctgaggtttgctgatctgtctgcttctttccacagggattracttgcatggtttccaagacaatgaaaatcaaaccaggatacatgggaacggctgcttcctgttatgatgtacaggtttgctcgggacactgaggagggaggaagtwaggggaaacactgattttcagtgatttatgttttccattgtttattgagtcaaaaataatagaaagtactgatattaagataacataagaaaaaaaggaggtagggaggttgggggaaggaaagagtgagggaaggaaggaggaaaaggggaaatgatttatattcttaccatccagaaggacccactttgaatagctagcaaattagctagacagtacacaagtatatatgctttaaaaacagaaatggggtgaatcttgacataatattttgtaactagcttttatcatttaacaatttaggtaaggatcttttcagttcaattaatgccaacctgcagcatgatttttaatgatgtagtaaatagtatatatccactgctgtttatgccttttatyggaccaagggatgatgtcccagttttcactagtaaaaatacactataatgaatgtgtagtagctaaagttttattgctttctcttgttgttttttgagaactagaatttgtgtttgtgtatctgtgttatgtgtatagttctgtatatctaaagtgtaacttagactctattcagtgtcatatccagttacttgccatgccattcactatgataaccatttgctaagcccctttcttagtatcttatttcattcctataaaaatcctgtgaaataagctgtcagtatctgttttatgggcgaaagcactgaagcmcagagtttaagtagttcaaagtcagctagtaaggtagcagagtaaatttgagttttsatctgcccgatttctaagtccacaggtgaggcaggtctcaaagataagaggaggctattactttatctgagctcctagarccaaaagcatctccccaggctcatctgggccagtctcaataaaaggattcacctaaactattccaggcagatagatcagagatctgagtttaagactcttgggttcccctggcttctggttgttgttttcagtctccactagagcaagagggtctttcatttgaccaattcagcaatctcatgatgccattgaagccatctcctgctgtgtgcmtcattcttccaatctgcttctttctccagatcatagatgataagggcaacgtcctgccccccggcacagaaggagacattggcatcagggtcaaacccatcaggcctataggcatcttctctggctatgtggtgagaaactgtgctcctcctcctctgttccccagtgaggatgggagcactaaacgggatgagggaggmcaaatgttctgaaacttccaagaggcaytagatrtggagacaaagastgtccagttttcaagaatgtatgctttgccagtggaagaaaagtggctattcagccttgccatcctcagcctatcactgtgatctcattggaagacttatttttcttcagttagcccttagactcctcaagaactctctgtttcatgcccaaaatattattgaccctgaactatacacagcaccattcccccaagggctgcctttccctctcccctaggtatcatccccatgctctatgccattgatcttctttagagccatgccaggcactttacagtaagacttcaccatctagttggaggaatccctatcttcagatcttgggaaggtaaagacagataatccttgaatctggccacctcacttgacaggtgaggatggtggagccagagattacaagacttgctcaagctcacaaccattagaaagtggacagagaagaccccaagggcatgccttctgatccctgagagaattgattaataaactaaataaayaataaatcaaataataatagtttctaccatttattgaatgcatatcatgaggcaagcattgtcctataaacacatttaatctttaaactttaaactcatttaaactttaaactcgtttaatcctcccagccaccctataaagtttttggactcagtttgctcgagttcaaaaccctgctctactatgtattgcatgatcttagggaagttacctatctgtcatgtctcagtttcctcatctgtaagttgtgtgtcgtgagtgtgttaaataaaagaattgttgtagatccaaatgattattcctattatacagatgaggaaaactgagcctcagtgatcagggcagagccacactgtccccttctccaagcatttcctttgtgtggtcccactctattctcaaatgccagtgaagtactatgtcatgggcttctccccatttgatagaaaaggaaacagactcagaagcgtctgtggggcagactcctaaggccacagaggctccatgatgcccatgagaaagtcaatccagtrgccaagaaacctggcttctggtctcagttctaccttctgtaatggctgtttagcttcagactaacctcttgatgtctctggtcatcagtatccctatattcccaatgatagagtgaggctaagaatcctttatgccaccatatataatccagtaactgaacttccagtctggagcccatgcccctatacctgagtcagataggaagatgcactgacaagggataaacctcaagccttttcattgcttataagcaagtgcctcagctgaatagacggacccagctattgtagaaatatgcacattagccagggtcccagggggcttcctggctaatgtctctagaactttcaaatttaacaaagaagctaagaaaattacctaatcaaaatgatagctttgagtggtgctatggagtgagcagagattaggatatctatgaaaggagagatggaatcaattggggaaaatgccctaagcatggatgaatgaatacatcaataatatctatcagactggacctagaggagtagctgagagaccctgggtggaataacttcaataaatgggaaagatccagttctgcctgtggcctagggttggctggttcagggcatgtctgccatgttcaggttatacactgcacacctgcagttnnnnnnnnnnnnnnnnnnnnnnnnnnnnnnnnnnnnnnnnnnnnnnnnnnnnnnnnnnnnnnnnnnnnnnnnnnnnnnnnnnnnnnnnnnnnnnnnnnnnnnnnnnnnnnnnnnnnnnnnnnnnnnnnnnnnnnnnnnnnnnnnnnnnnnnnnnnnnnnnnnnnnnnnnnnnnnnnnnnnnnnnnnnnnnnnnnnnnnnnnnnnnnnnnnnnnnnnnnnnnnnnnnnnnnnnnnnnnnnnnnnnnnnnnnnnnnnnnnnnnnnnnnnnnnnnnnnnnnnnnnnnnnnnnnnnnnnnnnnnnnnnnnnnnnnnnnnnnnnnnnnnnnnnnnnnnnnnnnnnnnnnnnnnnnnnnnnnnnnnnnnnnnnnnnnnnnnnnnnnnnnnnnnnnnnnnnnnnnnnnnnnnnnnnnnnnnnnnnnnnnnnnnnnnnnnnnnnnnnnnnnnnnnnnnnnnnnnnnnnnnnnnnnnnnnnnnnnnnnnnnnnnnnnnnnnnnnnnnnnnnnnnnnnnnnnnnnnnnnnnnnnnnnnnnnnnnnnnnnnnnnnnnnnnnnnnnnnnnnnnnnnnnnnnnnnnnnnnnnnnnnnnnnnnnnnnnnnnnnnnnnnnnnnnnnnnnnnnnnnnnnnnnnnnnnnnnnnnnnnnnnnnnnnnnnnnnnnnnnnnnnnnnnnnnnnnnnnnnnnnnnnnnnnnnnnnnnnnnnnnnnnnnnnnnnnnnnnnnnnnnnnnnnnnnnnnnnnnnnnnnnnnnnnnnnnnnnnnnnnnnnnnnnnnnnnnnnnnnnnnnnnnnnnnnnnnnnnnnnnnnnnnnnnnnnnnnnnnnnnnnnnnnnnnnnnnnnnnnnnnnnnnnnnnnnnnnnnnnnnnnnnnnnnnnnnnnnnnnnnnnnnnnnnnnnnnnnnnnnnnnnnnnnnnnnnnnnnnnnnnnnnnnnnnnnnnnnnnnnnnnnnnnnnnnnnnnnnnnnnnnnnnnnnnnnnnnnnnnnnnnnnnnnnnnnnnnnnnnnnnnnnnnnnnnnnnnnnnnnnnnnnnnnnnnnnnnnnnnnnnnnnnnnnnnnnnnnnnnnnnnnnnnnnnnnnnnnnnnnnnnnnnnnnnnnnnnnnnnnnnnnnnnnnnnnnnnnnnnnnnnnnnnnnnnnnnnnnnnnnnnnnnnnnnnnnnnnnnnnnnnnnnnnnnnnnnnnnnnnnnnnnnnnnnnnnnnnnnnnnnnnnnnnnnnnnnnnnnnnnnnnnnnnnnnnnnnnnnnnnnnnnnnnnnnnnnnnnnnnnnnnnnnnnnnnnnnnnnnnnnnnnnnnnnnnnnnnnnnnnnnnnnnnnnnnnnnnnnnnnnnnnnnnnnnnnnnnnnnnnnnnnnnnnnnnnnnnnnnnnnnnnnnnnnnnnnnnnnnnnnnnnnnnnnnnnnnnnnnnnnnnnnnnnnnnnnnnnnnnnnnnnnnnnnnnnnnnnnnnnnnnnnnnnnnnnnnnnnnnnnnnnnnnnnnnnnnnnnnnnnnnnnnnnnnnnnnnnnnnnnnnnnnnnnnnnnnnnnnnnnnnnnnnnnnnnnnnnnnnnnnnnnnnnnnnnnnnnnnnnnnnnnnnnnnnnnnnnnnnnnnnnnnnnnnnnnnnnnnnnnnnnnnnnnnnnnnnnnnnnnnnnnnnnnnnnnnnnnnnnnnnnnnnnnnnnnnnnnnnnnnnnnnnnnnnnnnnnnnnnnnnnnnnnnnnnnnnnnnnnnnnnnnnnnnnnnnnnnnnnnnnnnnnnnnnnnnnnnnnnnnnnnnnnnnnnnnnnnnnnnnnnnnnnnnnnnnnnnnnnnnnnnnnnnnnnnnnnnnnnnnnnnnnnnnnnnnnnnnnnnnnnnnnnnnnnnnnnnnnnnnnnnnnnnnnnnnnnnnnnnnnnnnnnnnnnnnnnnnnnnnnnnnnnnnnnnnnnnnnnnnnnnnnnnnnnnnnnnnnnnnnnnnnnnnnnnnnnnnnnnnnnnnnnnnnnnnnnnnnnnnnnnnnnnnnnnnnnnnnnnnnnnnnnnnnnnnnnnnnnnnnnnnnnnnnnnnnnnnnnnnnnnnnnnnnnnnnnnnnnnnnnnnnnnnnnnnnnnnnnnnnnnnnnnnnnnnnnnnnnnnnnnnnnnnnnnnnnnnnnnnnnnnnnnnnnnnnnnnnnnnnnnnnnnnnnnnnnnnnnnnnnnnnnnnnnnnnnnnnnnnnnnnnnnnnnnnnnnnnnnnnnnnnnnnnnnnnnnnnnnnnnnnnnnnnnnnnnnnnnnnnnnnnnnnnnnnnnnnnnnnnnnnnnnnnnnnnnnnnnnnnnnnnnnnnnnnnnnnnnnnnnnnnnnnnnnnnnnnnnnnnnnnnnnnnnnnnnnnnnnnnnnnnnnnnnnnnnnnnnnnnnnnnnnnnnnnnnnnnnnnnnnnnnnnnnnnnnnnnnnnnnnnnnnnnnnnnnnnnnnnnnnnnnnnnnnnnnnnnnnnnnnnnnnnnnnnnnnnnnnnnnnnnnnnnnnnnnnnnnnnnnnnnnnnnnnnnnnnnnnnnnnnnnnnnnnnnnnnnnnnnnnnnnnnnnnnnnnnnnnnnnnnnnnnnnnnnnnnnnnnnnnnnnnnnnnnnnnnnnnnnnnnnnnnnnnnnnnnnnnnnnnnnnnnnnnnnnnnnnnnnnnnnnnnnnnnnnnnnnnnnnnnnnnnnnnnnnnnnnnnnnnnnnnnnnnnnnnnnnnnnnnnnnnnnnnnnnnnnnnnnnnnnnnnnnnnnnnnnnnnnnnnnnnnnnnnnnnnnnnnnnnnnnnnnnnnnnnnnnnnnnnnnnnnnnnnnnnnnnnnnnnnnnnnnnnnnnnnnnnnnnnnnnnnnnnnnnnnnnnnnnnnnnnnnnnnnnnnnnnnnnnnnnnnnnnnnnnnnnnnnnnnnnnnnnnnnnnnnnnnnnnnnnnnnnnnnnnnnnnnnnnnnnnnnnnnnnnnnnnnnnnnnnnnnnnnnnnnnnnnnnnnnnnnnnnnnnnnnnnnnnnnnnnnnnnnnnnnnnnnnnnnnnnnnnnnnnnnnnnnnnnnnnnnnnnnnnnnnnnnnnnnnnnnnnnnnnnnnnnnnnnnnnnnnnnnnnnnnnnnnnnnnnnnnnnnnnnnnnnnnnnnnnnnnnnnnnnnnnnnnnnnnnnnnnnnnnnnnnnnnnnnnnnnnnnnnnnnnnnnnnnnnnnnnnnnnnnnnnnnnnnnnnnnnnnnnnnnnnnnnnnnnnnnnnnnnnnnnnnnnnnnnnnnnnnnnnnnnnnnnnnnnnnnnnnnnnnnnnnnnnnnnnnnnnnnnnnnnnnnnnnnnnnnnnnnnnnnnnnnnnnnnnnnnnnnnnnnnnnnnnnnnnnnnnnnnnnnnnnnnnnnnnnnnnnnnnnnnnnnnnnnnnnnnnnnnnnnnnnnnnnnnnnnnnnnnnnnnnnnnnnnnnnnnnnnnnnnnnnnnnnnnnnnnnnnnnnnnnnnnnnnnnnnnnnnnnnnnnnnnnnnnnnnnnnnnnnnnnnnnnnnnnnnnnnnnnnnnnnnnnnnnnnnnnnnnnnnnnnnnnnnnnnnnnnnnnnnnnnnnnnnnnnnnnnnnnnnnnnnnnnnnnnnnnnnnnnnnnnnnnnnnnnnnnnnnnnnnnnnnnnnnnnnnnnnnnnnnnnnnnnnnnnnnnnnnnnnnnnnnnnnnnnnnnnnnnnnnnnnnnnnnnnnnnnnnnnnnnnnnnnnnnnnnnnnnnnnnnnnnnnnnnnnnnnnnnnnnnnnnnnnnnnnnnnnnnnnnnnnnnnnnnnnnnnnnnnnnnnnnnnnnnnnnnnnnnnnnnnnnnnnnnnnnnnnnnnnnnnnnnnnnnnnnnnnnnnnnnnnnnnnnnnnnnnnnnnnnnnnnnnnnnnnnnnnnnnnnnnnnnnnnnnnnnnnnnnnnnnnnnnnnnnnnnnnnnnnnnnnnnnnnnnnnnnnnnnnnnnnnnnnnnnnnnnnnnnnnnnnnnnnnnnnnnnnnnnnnnnnnnnnnnnnnnnnnnnnnnnnnnnnnnnnnnnnnnnnnnnnnnnnnnnnnnnnnnnnnnnnnnnnnnnnnnnnnnnnnnnnnnnnnnnnnnnnnnnnnnnnnnnnnnnnnnnnnnnnnnnnnnnnnnnnnnnnnnnnnnnnnnnnnnnnnnnnnnnnnnnnnnnnnnnnnnnnnnnnnnnnnnnnnnnnnnnnnnnnnnnnnnnnnnnnnnnnnnnnnnnnnnnnnnnnnnnnnnnnnnnnnnnnnnnnnnnnnnnnnnnnnnnnnnnnnnnnnnnnnnnnnnnnnnnnnnnnnnnnnnnnnnnnnnnnnnnnnnnnnnnnnnnnnnnnnnnnnnnnnnnnnnnnnnnnnnnnnnnnnnnnnnnnnnnnnnnnnnnnnnnnnnnnnnnnnnnnnnnnnnnnnnnnnnnnnnnnnnnnnnnnnnnnnnnnnnnnnnnnnnnnnnnnnnnnnnnnnnnnnnnnnnnnnnnnnnnnnnnnnnnnnnnnnnnnnnnnnnnnnnnnnnnnnnnnnnnnnnnnnnnnnnnnnnnnnnnnnnnnnnnnnnnnnnnnnnnnnnnnnnnnnnnnnnnnnnnnnnnnnnnnnnnnnnnnnnnnnnnnnnnnnnnnnnnnnnnnnnnnnnnnnnnnnnnnnnnnnnnnnnnnnnnnnnnnnnnnnnnnnnnnnnnnnnnnnnnnnnnnnnnnnnnnnnnnnnnnnnnnnnnnnnnnnnnnnnnnnnnnnnnnnnnnnnnnnnnnnnnnnnnnnnnnnnnnnnnnnnnnnnnnnnnnnnnnnnnnnnnnnnnnnnnnnnnnnnnnnnnnnnnnnnnnnnnnnnnnnnnnnnnnnnnnnnnnnnnnnnnnnnnnnnnnnnnnnnnnnnnnnnnnnnnnnnnnnnnnnnnnnnnnnnn

SEQ ID NO: 93653 - DNA, 36060 bp, Homo sapiens
  misc_feature (1)...(36060): n = A,T,C or G
tttagcctcaaatggaattttaatgccatcttcatttttccctagtccctttcctggtatatatcccatcttggtcatgattttttgactcgtggggctatataatggagcgggcatggtgatttccgcaccccattgttgtaataaatctcaaccccacagattaagaggaattgaagtaatcattggctgaacagtactttcttgattatctggccctaagcaatgtaaaatctccgtactttgatacacttctgaggctgtgcctatgccgacaagtcctgtaacagccttttgtttaggccaattttttggccactgatttaaagcaatgatagagacatctgctccagtgtctaccaacccttcaaactgttttccttgaataatggccttacacacaggtctgttctctgagacctgacttgcccaatatgcagcctttcctgttggatcagtgcttccaagccctcctattttttttagttcactatttccacccttaatatatggcaggagtaataattgagcactcctgtctcctggactggcactccaaggaattgaagagctaataaccaactgaatttcgcctttatagtctgaatcaaccacactagtatgaatttgaactccttttagatttagacttgatcttcctaagattagtcctacagtcccctcaggcagggggccatatacccctgtggggattttttgtgggggctcccctggaagcagagagactgcttgtatagtacataaatctactgctgcactgctgcttgtggcaggggacaattgttgtattgtggtaactggcttattccctgaaacacttgggacagtgggggttgttgtccctgaaaaccctgaggaacaaatggctgaattgggaatgccccagtttgttgtggggcctgaggctggcccctttgctcgtttcccgacaatggttgcccatttttatcaaatttagaacgacattgactagcccaatgttttccttttttacatcttggacataagtcaggtggctctctacctgttgtagttgcttgaatagttatattctgtttgtttaagactgggcaattcttttttaagtgaccaatttgaccacaattataacattttcctccaaatgttctaacttgtcctcctaaaacaactcctgttattgcttgagccataagcatagctttatgcatagctcctccgattccatcacaggcttttacatattctgagattacatctgatcctgcaggaacctttccttttaatggcttaatggctgattgacactcaggattggcgttttcatatgccatcaactccactatgaccttacgggctttttcatcggcaattgacttttgagcaacatcttggagccttgccacaaaatcaggatagggctcttttgaaccttgtcttactgtattaaatgaggggcaggcacttcctgggtcttggattttttcccaggctctaaggcagatagctctaacttgctcaatggcctcattttgcattaatgcttgttgactaatagtactccaattttgacctattcctaatagttgatctgcatctatgttaactggaggattggcagccctatttcttcggacctgttcttgtaccccatcaatccaccaagtcttaaattgtaaaaattgagagggtgagagagacgattttgccagaatctcccaatcataaggaatgagtctatgtccataagcaatggaatctaataatgtcctcatataaggggagttgggtccatactgttttactccctctttcatatcttttagcatttttatcgaaaaagacttgtatctggcctcaactgtgggaggctctccctcttgggctccttctccaggtggcatcggttctaacgttactgggaattgccatgcctcagtatctccttcctttcttgatttatcaataatttcatgtaattcactaccctgtctactaggtggtgccgtaggattaagtctcctagtgggcggctgagggtatggcgccctgccctgtggtgctgggggcattcctggatatccatactgactttctgggggtggccgatactgaagttcagccggaggccagtattgataggctactggcggttgggtcttattttctttaacctgcttttgaggttgtaatgttacgggcacctgacctgctggaagaggacttgtccctcgtggtttagactctgatggccccactaattctggaccttttccttctaattttaacgtttcaggatatatcacctcctgtaattgattatagtcaacattttgcgttgactgagccattaccggctctgctacatattcgcaatgtaaactttccgtttctttctgggattttttccttgtcttttcattacaatctattaaacagcttccaggggcatcagaaactgaaacgctatcttcttctgtttgaaatggttctaaagctgctttaataatggcccaatcattccatactgtaagtggaatgatattacccttcctacctgcttgttttagttccttaccaattcttttccaatcttttagatctaaagttccttgttctggaaaccatgggcaaaattgttctattatttgaaatagcttgattagattttttgtagatactttaactccccctctttttaaaagaattttaataaagctgagataagaggcatatttacttttaattttacttttagtttgccccattatcaccctagcttcttccgagcgcacaagcttaccgtaaggctgactgtagacgtactcgggatctctcgtcgacttgtcctcaatgaccacgctcgagcgtaccttcaccctagagaaaagcctccatgttgggcaccagatgtaggggtgggttgcccctacacacctgtgggtgtttctcgtaaggtgggacgagagatttggaaaagaaaaagacacagagacaaagtatagagaaagaaataaggggaaccggggaaccagcgttcagcatatggaggatcccgccagcctctgagttcccttagtatttattcatcatttgtgggtgtttctcgaagagggggatgtgtcagggtcacaagacaattgtggggagagggtcagcagacaaacacgtgaacaaaggtctttgcatcatagacaatgtaaaggattaagtgctgtgcttttagatatgcatacacataaacatctcaatgctttacaaagcagtattgctgcccgcaggtcccacctccagccctaaggcggtttttccctatctcagtagatggagcatacaatcgggttttataccgagacattccattgcccagggacaggcaggagacagatgccttcctcttgtctcaactgcaagaggcattccttcctcttttactaattctcctcagcacagaccctttacgggtgtcgggctgggggacggtcaggtctttcccttcccacgaggccatatttcagactatcacatggggagaaaccttggacaatacctggctttcctaggcagaggtccctgcggccttccgcagtttttgtgtccctgggtacttgagattagggagtggtgatgactcttaaggagcaggctgccttcaagcatctgcttaacaaagcacatcctgcaccgcccttaatccatttaactctgagttgacacagcacacgtttcagagagcacggggttgggggtaaggttatagattaacagaatctcaaggcagaagaatttttcttagcacataacaaaatggagtctcctatgtctacttctttctacacagacacagtaacaatctgatctctcttgcttttccccacactgggtaacacagccagaccctgtctccacaaaaaaatattttttaaaaattagctaggtgcagtccagcctgtagtcccagctacttgggaggttgaggcagggggatcacttgagcccaggtgtcaggcctctgagcccaagctaagccatcatatcccttgtgacctgcacggatacatccagatgggctgaagcaactgaagatccacagaagaagtgaaaatagccttaactgatgacattccaccattgtgatttgtttctgccccaccctaactgatcaatgtacttcataatctcccccacccttaagaaggttcttggtaattctccccacccttgagaaggtactttgtgagatccacccctgcccccagaacattgctcttaactccactgcctatcccaaaacctgtaagaactaatgataatcccaccaccctttgctgactccttttttggactcagcctgcctgcacccaggtgaaataaacagccttgttgctcatacaaagctggttggtggtcccttcacagggacacatgagacaccaggagttcaaggccacagtgagctgtgatcacatggctgcactccagcttgggcaacagagagagaccctgtctcttaaaaaaaaaaaaaaaaaaagccatcagctggctcagggtagccacctgccaagggtccccagctgagcctaagacctgcttcctaggatttacagagctcctgtgaaactcggttgtttcattgattgtcacatggagccagtgactttcaggccagccttgttcccacaggtgccctcacaggtgggctctcccgtgggcctgggcacccagcgctaggcctgctctgctatggtctggacgtgagtggtgatctctgtgatccctgcacccctcgcttctccccctgccctctctgcagccctgcccctggcagcccctgcccaccttcgcctctgtgcagggccacaggcttccttgaagcaaatgctagaactttgcttttttaaaaaaatataacagctttattgagatattgaatggttttttagtctatacacaaggttgagcaaacatcaccactctctagccccagagtatttccggaccccaaagaaactccgtgggccttggcagcccctcccactcctcccgtcctccacctccaggcaccactgccagtgccatactcaccaggctccactatgggcttgtcttcgtgtgacttctgtctctatcgatttgtctattctgaactcttcatataaaacgaaccatacaacttgtggccgtttgtgtccggaatctttctttaaaaaaaaaaattcaccgggcgtggtggctcacgcctgtaatcccagcactctgggaggcggaggcgggcggatcacaaggtcaggagatcaagaccatcctggctaacacggtgaaaccccgtctctactaaaaacataaaaaattagccaggcttggcaggcgcctgtagtcccagctactctggaggctgaggtgggagaatggcgtgaacccgggaggcagaggttgcagtgagctgagatcatgccactgcactccagcctgggagacagagcaagactccatctcaaaaaaaaaaaattcacttttatttttgagacagggtctccctccattgcccaggctggagttcagtggcacaatcagctcactgcagcttcaacctcctgggctcaagcaatcccctcacctcagcctcctgagtagctgggattacagacatgcaacactatgcctggttaattttctattttttgtagagacgaggtcttactatgttgcccagactgctctggcactcctgggctcaaaagatcctcctgcctcggcctcccaaagtgctgagattacaggcgtgagccaccacacccggctatttttattttttagttgacacataataattgtacatatttgtggggtacgtagtgatgtttctgtacgtgtatagtgatcagataagggtaattagcatacctatcatctcaaacatttattatttctttgcattacgaacactcaatattctccttcaagctatctgaaaatacataatttttgttttgagacagggtctcactctgttgctgtcttcacggagagcaggagcagaggctttgagaagccagtgggccttggcctcagccctgccggcagagggtccccaccatgcagctgaagtgccagggtgcttgtgaagtctaagcccttgtctggcatttgtcaggaatatagggtgaggcctctgggaccgagcggggcggggcggggcggggcggggcggggcgggaccaacagcgcacacttaagcggcccgggcgggtaccgccgtcccgccatggctctgaggcgcgccctgcccgcgctgcgcccctgcattccccgcttcgtccmgctgtccacggcgccggcctcccgcgagcagyccgcagcgggcccagcggccgtgccaggaggtgggtcggccacggcagtgcggccgccggtgcccgccgtggacttcggcaacgcgcaggaggcgtaccgcagccggcgaacctgggagctggcgcgsagcctgctggtgctgcgcttstgcgcctggcccgcgctgctggcgcgccacgagcaggtgygcggggtgcaggcgggggcgcgggggcttctgccsgtcccgggagcctttacggagcttcctggcstgaaacgggtgcctcccaagcatctcctggagcaagggaagccaggaagggaggcgtttcctgcagtccctctcrgacctcgcaaattttcctatttgtcgatgtctaccaactaaaaacaatggtcgttttcatatttacgatatataccacttgtgggaatacagagttatcacttggaatttaaaatggagtattcttcatgttgagacaagagaatcctggtgtagggctcatagcctggaaccccggaattcaaaccccgggacccagcagcttcccagacacggccactctgagaacactgttggggaaaaatgggaagcccctcaaacgcccagctttgaactcacccatggtagctttaaaaagtgtcagggcttttggtggcggtggtggggggcaacaagcagaacactgttttagccgcatcagcctaggggtactagagatgacggttatctccaggtgaccctgggaagagtttgcaaggttccgctttttggcgccagggtatctggtggtgttgatttctcaggtgagactgtacagaggtcgggggctgcacccctggcctcaacaggaggcgggggaaggcgggggacggtgtsagatgagaagcaccgagccacasttgagcttaggtgaggcctcggcgggtgcgaggtgagggcagggatccacgaactcagagtcagatgctgttggcccgaatcccatggggagcgccaaggtcagcctaggacccgtggtggcgggagtgcggaggatggtggaggaagaaggagctgaactggacagatggagggctctgggagggcaytgctgtgtgtgcacacaaggatgtcttaaggtcaagttttggycatagagagccccggccaaggagacaggagggcgagaagggacatcccaggtagaggaactggcaaggtgagggacggcgatgtggaggctttggggagtgcccacatctaaggggcatcccaaaagaggagccagtgctggtggtgctgcaataggaggaggaggcagcagggcagraatgccaggggagggagtggccagccacaggtccctgcccagggcaaggacgggcatgctaggtggcagctggggccagtcgtgcagaagccatgcccaccttgtggccgggatggagtggggactaggaaggcaccaggtcaggtttctgtaggcacagccctaagcatggctgggatggggagggggctaggaaggcaccaggtcaggtttctgtaggcacagccctaaggtttcttgtctagattcaagacaagttgttgcacagagaagccagcagagctgggtgtggggtttggtgcccagtctgctgcggggaatgccaggtgctgttccgtgactgtgggaggaaactgttggctccgctgtcccttgggtgccttcttgaggcragtgccagggctcagggatggtgctgtgagtacctggaagaggcagggcatccagaggtgacctctcccaggctcccctagggtcccacctgtgccctgggaagyccctcagtggggtctgtactgttgtcttgctagtggtcccatgggtgtcggcagcctcagcactggaagaaggcagaggccaggtcctgggcttgtgagctgctcactagaacctggtcctgtgagcgggccagaggggagttccttccctcaccctctgggctgtggggagattccttctgctgagccagcacaggtctgtgaggcacccgggcagtgaggccacatctgccacaggcgtgtcaggttgtagtagctgatctttgagctgctgccttggatggggacagcagtggggcccgcccttgcctgaaagccagacttattgaggagggtttaggaaagtcccaggatttccatgacaacagcactgaggttgggtgtgcgccctcacagaagggacaggacccgtggtgacagtggttccctgagtggggggaggggagagaaccggctctaccagtgttactctgcacacatttggttgagtctttcacagggggtacaagtgtatgtgttactggtgcaggtttctaaatcctcgaaggatctcctcacctgaagaagatgtggggctgccctggtctcaggtagtgccatgcggggacatcagtgacaccaggatggtgttaaagtggttgctttgctgtggagtcagctttaaaattacaagccctrggctcatgcctaggcrtggtggctcatgcctgtaattctagcacttaaggaggtcaaggcaggaggatcatttaaggctaggagttcaagaccagcctgagcaacatcgtgaaaccctgtctctacaaaatatttttaaaagttagctggggccaggtgcggtggctcatgcctgtmatcccagcactttgggtggccgaggcgggtggatcacctgaagtcaggagtttgagaccagcctggccaacatggagaaaccccatctctactaaaaatataaaaattagctgggcatggtggtgtgcgcctgtaatctctgctacttgggaggctgaggcgggagaatcgcttgaacctgggaggtggaggttgcagtgagccgagattgtgctactgcactccagcctgggcaacaagagcaaaactctgcctcaaaaaaaagaaaaaataaaagttagctgagtgtggtggtgcatgcctgtagtcccaactactctggaggccgagataggagtgtcgcttgagcccaggagtgagaccctgcctctaaaaataaataaataaaaaacttgccagccctgcctgtgtgcttctgcagccctgtgcagggagcttccaccctcagcccgggcccagtcccccagccccccatctttgtgaataagcatccctggagtcagtgcagcctgggctcccgccccttcatttagtgctggccgtgcrgaggcgagcagttaggtagagggagactgcgtggccccgtgcggcagtcgacagttgcccaccctccctcctgttgttttctgatggttctctcagagcggatgtggataagcccagtgatggtgttcaggtccccagttctgccccgcctgccacttgggtgatctttgatatgtttcagacccatcctgttctcccaactatccctgggtgctgccagcaggaatgaggcctggctcaggctcagtgggagacggagaacatgtcagcctgttcattttccagtttctaatcctcttgataaaagaacaaaatgccttaaagtcagattctgcttggaggctgcaggaaggcaggggtgagtgcctgggaaaccctggtccttggggctgccccatggcgtgcccagrggtgatggtcaggaggcgtctccatggggcaccaatgttcagggtaaggctgtggggctatgtctgcctgtgggcaggcgtgtgggtgctcagggctggcttgggtgtaagtgtttgactcgctaatggttttgcttagactagaagttgttcctgaaactacggtctcaagagatgctccccacataaaaggagttctagtatccwttgggtttgagaaaccccaggctcttcctgtgttggggctgagtyggcaggggcagcagacacaacgcggaggtgtgcttctgagcatcacactcggccctcctctccaagtagcctctcgttgtccctgtcctttctgccctkgctgtcccccgtgctggagctcccacagttgtccatgccatctcctcgccttggcaagccccactcctggatctgggttagtaaacacccctgccctaccctgcaggcactgccccatccccctgtcctgagtcataggcagagtccctccttcccctttggggttcctttaccaccaggatgtgagatcctggtcggtttcctttggttgtttccagtctataaaaggtgcttggtgcatggcagcttgggacatctgaatgagcgacgtggtgaaatatgattggaggagacagacagttcccgggcagcatctgtcagagtggctggtcagccccagatgaccctgcagagcgcatgggtcctggggtgggagtcatctcacaggcccctgtggactgtcatctagctcattgtccttgttgccagggcatgcctccctccagctgggcgcagactcagcctgagtttcacacgtttgttatttagcatccattcgggggctggcctcatgccagtcacactgtttaagggacttgggataagagggaacaaaacattgaaaaatctgggcactcaagtactagaaagtcaagttagatcctcctcttccgcagcagaactaccaaggtgtggatacagaggatggtctcaaaatgccggctgtcatccccagggaggctggccattctcctttttatccaccaagcagtggtcaggcacccactgtgtgctgctggagtgactcatgggtggggccctgaaggggcagagtccaggtgggaacagtgtcctcaggccaagcaggcagcacctcstgtggtctctctgccctggatgggaactggagtgatggacagggtggagaagcaagcggctttagctggtcttcaccatgaaactgaccctgaaagcccagtcgccaagagrccatatcgaggccccatggctggggtgaagtgtggtcggggatgagcagcggtgccttgctgggraaggagagttcaggcagcccaggacagcggcttccctttgcctttcagctgctgtatgtttccaggaaacttctaggacagaggctattcaacaagctcatgaagatgaccttctatgggcattttgtagccggggaggaccaggagtccatccagcccctgcttcggcactacagggccttcggtgtcagcgccatcctggactatggagtggaggaggacctgagccccgaggaggcagagcacaaggagatggagtaaggcctgcccggtgtctgcgggctttctgatcatgaccctggagcacccagtgggagcaggtgggatgtrtccagctgctgggcttcagcctcagctgggcagaggccaaggctaggagagcttggtcagcccaactaccgatgaccctcctgggctctgcctggagttcttgcatttttgtttcatgcggtggacagctctgggctttcatgggaggcctggtgtgcgtgaggcctgaggaagcagagtacagaatggcccttggccctatctagtccaccgcctggaggagcacaggcaccagcatatgaaccaagcactctgcaaagaatggttggtctcgcctggatctcacatgagccagggactgctccaggaagtggagggaaacgtggtcttgttgttctgtcctgatgccctgcccaggagggcgggtcagggtggtaccaactgccctctacactcactgcccagggaaggggccttgtatcagcttagtggcctccaggagctgactccaggccggcctgctacactgctcctggcttcaattcccttctccactgacaatggggcaggggccaggcctgggaggttccacaactgcagggcaggctgaggccaggcaagggtcgggcagtgggacctgcctgcgggtcaggaatccctgcaaaagagaggctgtagcagagcctcctccatcaggtcagcaagtttgtgtaaacagccaggtagcacagactctcagtcrggccacaccctccctgccacaacggcttcactctgcctcagtagggccatagtaattagaatttcatataattttcttgtgtcacaaaatattattcttgttttgatttctttcaaccagttttttwaaagtagggtcttgctctgttgcccaggctagagtgcagtggtgccattgttcactgcagccaaccttctgggctcaagtgatcctcccatctgagccccctaagtagctgggaccacaggcacgcaccaccatacctggctaagttttaatttttttttgtaaagatgggatctccctatgtcttcctatgtatttgggtcccctgcaccctgacagcagccgggcctgacccacataaggcttgggacagtccctctgtggacctggtcaggccttggtggttgttcctgcccctcccctggtggctggcctgggaaggggagggaaaggcagtcacatgaggcctccagccctgggaacggaatgtctgaggcttgcctcagcatgtcggctgccagctgcctggagaggattggccaggggagcccagcccctgccttgcgattggctgttttgaaggtggggtactacagccccagcaccccactgtgttcctagcaggccccgtgggcctygcagctgcctgagctcttggctgcagcctttgctgagctgcctgttgaataaccaatggcctgtgtgttctcrgaaggagtctgggtggggacttggtttcacaatgggattttcctctcaggcgcctctggtatgaaaagactcctttcccagggtggtcctgcctggcttcctccctgccctgcaggctgagtgtctggaggtggactggcctgcactctgccagggggctgggcacctgtgtccttaggagcttgagtcctttgccctgcaagggattcacctgtcttgctgctggtggctgctgtctgcaggggtcctgctccagctctgggaagtgaacaggkttccctcctgtcctcacaggggtgcatgctgaggacacctaccgagctcagctgctttgtgctttcagaggggcctgagccatgggggtagggctgggtctgcaagcactggtctgatgtccacactgcagcatggcctgcttggccaggagtgaccagtcacgcagaccctagtgcagggaactgcttagagatctgccttcctaacctaccctcctgtcacaagggccatgggctctactctggggagagacactgaggccaccgccccaaattaaggccatggcaagtggtgctggccgtgagaggcccagggaggatggaggcgtctgagtgcatggcaaagtgagtcccagcagtgctcccgagaaagaaagaggaggtgggagcctggaggtgcaggagggcaatgcccacccggggggggggkggaccatgcttcccagaggccagggccccacccaaccccaggagaggagtcccagggatccccgaagcaggctgagggcttggggatggggaaggggccaaggcatcttcctgatgattgggctgtgagggaacacctagggggtrgatgggggcattggtctggctgtgcaggcccagggctggctggaggcaggatatgtgtgcagtgagtgtcctgagcgaggggctggggaggcagagggttggggagctggggaggggggtacaggtaggaagcggcttgccaggcttccctccaggagagagttggacaagggcggggtgtggacccccatgctctgcttgtttcaataggcatcaygtccccagggacagccacccagagctgaggtggaggctgagggggtggtcagggtcttcctgctgtctctgaagaccccctggggacacgtgcttgtcctcctctgccctatgtccccttgtcgctcttccctcctctgttgtcccrggtcgtgcccatgtgtgcgatcatgtgcccttcaacagactatgccctgggcmtgatgaggggtgggactgggggagcacgaggcaggtcctggctttaaggaggcattgggatgtggtccccaccctgatcagggccccacatccactggttcacccttcctcctctaacaccccacagctgccagtgccatgtgcccccctcttccctgtggtgccttgagccaggacgtggcaacgtcccaggtggcgaaagccagatttcctgtgtggcacccgcagttctgaatcagctgctcccagggtgctttcttcctcttctccagtggaaataggacccctgacctgcctgggaaccaccatttgtgtctccttgtgacttatccatgatgcctgttggagagtgtggccctgtccttgctgcgtagccatccactctgagacctggctgcccctctggccactgcacrtgctgtgtggtcatcttggccactgcttggctgtgtcagcctggtctgtgctctggaagttcacggagaggagcagcggtagcctatggtgttctgcctctgagtgtgtcagagcaggagagggagcagccctggcttccccagcctctcctgccaggcccacctcagaggatgaacacagcagctgtgggaatgctgagcgggaactcatctgcctggggacctgtcagataatgatcctgtttcatgaaggtgagctgcctcacaggcagacacctgtgtggttaagtcccgtgttatccaaactgtgggctgtgtggtttcaggatgggaccttctcttcagggtcatggaggcccctgaggccctgtccccactgtctgctgttacttgccatgagggtttctgccctgggcagggccctggctgccaccccggccttaacatagacagtgagtcccccttggggatggcttttcctggctgtacctaagccttggcgtgaaggtcttagggctgatctcatgactggtcttgaggtgcccaagccaggggcccaggagctccctgtctcaggcaggggttcacgtgctgcctgcctgttccctagtcacatggtgacattccaccctcttctgtcacatctctgtcagcataaggtggccagagcatatctgcctgccagctcccatcactgggctgcagcctcaggggccctggcagcacatgtggagtccctggcccatgtggggctgcccaggagtgggtgggagggaaggcctcctggcgggggctcctggcccagggcttgctccttgagcagccaggtggaaagtgggcagctgaggccccttgacatggaggcctctgggatgcggctcactgaccactgctctgcctttccccttcccggcatctgagggggaccctctcctttcctgtgagtgtgggcagagctgcccctgagggtccgagcgcctctggggagcttcaggaaggctctgggtgctgttggtcatgcagctgagctctctccgtggtcactgacttgatcaggtttgaatataaagtcaggtgaccctcagagctgctccgggggccagggagaccatggtcgctttgtcacagcagacttaacggccgcagcaactcttgctagcctggatgacacagcactgaaaccaagtgccagaagcagattgtggctgtggggaggaggaggaagaagaggaggctctggcaggggtgcagggctggtgggggaggggagccaggtaccctagagaagggaggggccagggggaatgggggtgctggccaggcggggatggagaggcttctgcaggaaggacaggggcttggctgagcagagtgtggccagcctagcgggggacagcctgcatcctggcctcactggtcttgaggtgcccaagccaggggcccaggactttgggcattactaggaaatgatgggaaccctgggtggggtggcgtgaaacaagatgagatggtaagatctgctttcactttaaaggaacatttctggttgttgcttggaaaagaagtgtcggggcaagaatgctacaggagggccggcctggaggacagggcgggactgcagggctggctgtgcgggggcaggagcctgtgcttgcatcagagctgcctgggagaccctggctctggggtggaggcctgagtaagggggcctcgctggggatttggggacctctgtgtgctggtgycttcccgcctccgttcctctcagccctgactggctctgtcttggaaccaggtaactacctttatttgagaacctgctgcaagccctgggctgttctgagagctcaggaatatcgttctgatttctccacccacaaggagccccgggcttcctgagcccttgggacacagcagccccataaactgctgcccctcccaggcccaagtgttccaccccaggctaggggtggggctggggctgcaccttggaatctaccctccaccggggttgtggtggggccctccgtgcagcctcagtgggaacgtgcctgtcacctgaggctcaggtggcgtgaccctgacctttgctctccccctccttcccacaggtcctgcacctcagctgcggagagggatggcagtggtgagtgagaggctgccgcgcaggaacagactccctcccgactccgcacaccccttggtggctcaggagagtctaggctggggcacaagtgggccttggggtgacgtcggagcccgggctcctccctatgtccagggcacctgccctgtcgctctgggctctgacatactcgcaagtgtctggggagacgccctgctcctttttcatggcctcctggtggacctaggcctttgttaaggagactgccgtcctggcctcatgaggaggcttagccagggggatgcagcactccaggtggaagagccgcggtgtagacaggagggtgggcttggggatgggaaccatgggrcagygcagtgccagggccaggctggcaaggccactatgcttggagccctcctgagggcaggggccctgggctrttggtgtgtgggtgctgggggtgggtgtttggagctgtgctcaggccgtgcattcgctattccaggcacgaataagcgggacaagcaataccaggcccacyrggccttcggggaccgcaggaatggtgtcatcagtgcccgcacctacttctacgccaatgaggccaagtgcgacagccacatggagacattcttgcgctgcatcgaagcctcaggtggggccccctctttgctggctatacccctgccatgtcccagcctgagcggacccctgggctcatggaggtgccggtgggtgaacactaagctggggcaggagccagagggctgggttctgaccacacttgggyccctcactgttcagccccttcctgaggggccccactgcctcccagaaggcatctcctctcctgccccagctccctgttccctgatcccgcctcatgccccccacccttctccctggctcagggccaggatcgggagctgcaggaagttggtccatgtcagctgccgagccacacttagcccagggtggaggttccattcagggagctggtgccgcatcttctgtccttccctgacacagcctctgggggccagcggtgggggcagcaggtgtttccagggatagagaagccagaggtcagcaaggcccartgtccttcagtgttagaaacatccgacctgcacagccccatgctggccccagcagccctccgtcaggggcagcgggtcccaggcctgtttatgtttttgtttgtttgcttcaaatgagactggatcttgctctgtcacccaggctggagtgctcacgcctctaatcccagcaatttgggaggccaaggcgggtggattgcctgagctcagttcaagaccagcctgggcaacatggtgaaactccgtctccactaaaatacaaaaaattagccgggcgtggcagcaggcgcttgtaatcccagctacttgggaggctgagacaggagaatcacttgaatccaggaggcggaggttgcagtgagccaagattgcgccactgcactccagcctgggcgacagagtgagactccatctcaaaaaaaaaaaaaaaaaatgaggtctcactatgttgccctggttggcctggaactcctgggctcaagtgatccctccaccttggcctcccaaagtgctgggattacaggcacacactaccacacccagctaattttcatattttttgtagagatggtgtttcaccatgttgcccaggctggtctcaaactcctggcctcaagcgaaccttacactttggcctcccaaagtgctgggattataggtgcatgccgctgcacctggcacttctgagcagtgcttggaagccgcctcctgatgggggctgagggtcagagtggccagctgaatgctgggccatcagggtgaggggcgtcttctcctcgtccattgcctgttctcccagggcaggtggaaggggaaggccctgcattggggtggcgtgaaacaagatgagatggtaagatctgctttcactttaaaggaacatttctggttgttgcttggaaagaagtgtcaggggcaagaatgctgcaggagggctggcctggaggacagggtgggactgcgggctggctgcacgggggcaggagcctgcgcttgcgtcagaggttcctgagagactcggtctctggggcagaggcctgagcaaggggacctcgctggggtgtctctgtcttagccacgctcggtgtttctgggtcctgtgacccacgtgtgagcagcctgtggtgctggtggcacagggaaggaaaccgaggcagggagcctgtgggggctgcttggcaggggacaggcagctcctgtgcccactgctgtcccacacctgcatggaaacagaaaccccgccacggagccccctcccatctccacagggcctcyagagcgccatgtgcamsgacttcatgggcggggtggggtggggtcaggagcctgctgtgggctggccaggccctggccctccctgtcscaccctgcgctgcctccatgcacctctcagggctgtcatggcttttcctgtggcttctgacaggtagagtcagcgatgacggcttcatagccattaagctcacagcactggggagaccccagtttctggtaagtgctagaaccttccacctgcagagtctggtgctgtgcgagatctcagggcagctgtgggcatccaccaaaaacacagrtgcccatgccttagaggcctgagctggccacaggggctgtgtgggggactggggtgggcaggggcrtgtgcagatggcattcaggcctgcgtttgcagctgcagttctcagaggtgctggccaagtggaggtgcttctttcaccaaatggctgtggagcaagggcaggcgggcctggctgccatggacaccaagctggaggtggcggtgctgcaggtggggcagccttccccttcccyactccygtggcttgtgagggggtgggcaccgtggggtcacacggggcatrgtgggcagtggtcggaggtggttttgggaactcacccagggcatgtggctcactctgcagctgctggggttggcctggtggggaggaggaggtcagagggactctgaacagagaggggagatgctggcaggagggctggagacccagccctgcagggcgtgggcgtgcatcagcagcggggtgggaatagacctgtctatgcagtagaaacaaaccagacatggatcctgttcttactaacgatgtaataaagccagaaacagcaccagaggccaatgggtggggggaaggataaaatatgagtgaatggggctgatccaggccttctcacttctcaaggaaagtgtcgcaaagttgggcatcgcatccagggctgagattgaggactggttcacggcagagaccctgggagtgtctgggtgagagcagcccccaggctgagaggacacgagcatcagccatggttccagccaagccccagtgacgtctcccagtcctggctgccctgcctgagagggtgggccctgggatgacagtgctgaaggaactgcttttcacacagcaggacttgatggcttcaggagtccctgaggctggggctgggctgggcaggggagacacagggccagcacagaccccatagagggctctttatagaattatctgggtccagagcaaaggtggcactctcagccctccctggagtccacgccggcaggtgaaggatcagagccccatgccccatccttggggccaggggctgggacccaggtcaccaggagcctccagttgaagtggggaggtgactggggtggtgcagtagtgagccatcccctcacacactgccagccttgcccactgtgtcctccctggccgcccggagctgtgtccgcctcctgcctggctgcctgtgctcggcccctccacaagcccaaaacagccctagggtactcagtgttttcagagccgcctagatgcaggrctgtttgtgttttggttttaaatttwtttaattaatttattttttatagagaccaggtctcaccatgttgcccaggctggtttcaaacccctgggctcaagtgacctgcccgccgcagcccccamagtgctgggattataagtttgagcccccgcatgccactggttttaaatttttaaacagaaaacaatatttatatttcctctgtcttttaaaactgaacaccgaggtgggttttgtggtgggtggtgaacggacaggtttgggcctygatcccccacccgaccctagcacccacaggtgggggtgccccctctgctgatgcgcctcctccctcagcaccatggacctgctggactggagcagcctcatcgacagcaggaccaagctgtccaagcacytggtagtccccaacgcacaggtaacacctccgctcctcagtgaggcccagctcagcagggcgctgcgctaagaagggaattcagcctgccacgtgtgtctcttgttgcctaccctgggaacttaacatgaccaaaatcactgcacactatggccccacagaccccctgtggtccagggggaagaagacaarcccactagtgtccacagagtgcttggcgggacagagacccacrcggagccttaagacaccacaaggagagggggtctgggggccttccccaagtcatctgtcttgtgcatcaggtcaccccaaacttcagaggcctgaaacggcagcagccactctgcttctgcctcatggttctggggttgacagggctcagctgggcagtcctcccctggggtctcctgggtagctgtactcacagagtggtggcgctgggacctgggggaggcrcccattcacatgtctgggagttggtgctggctgtggcttgggctttttcccaacatggcagctgggctctaagggccagtgtcmcctgagacgtgagagccaggcagaagctgggtgaccttttcctgcctcgcctcagaagtcacacggtgtcttttctggcaagttctgtttgttagaagcatgtcaccaggccagcctgtatacagcggggagaggaatgagactcatctgcctgtgggaggggggcccaggacctggcagactgcttgaaaccacagcttaaactggrattcaaagaaagaacagaagcaccttcagaaaacatcctgcagaggcagctttccatgacacatctagccccagtccactaagggcccagcctcaaacttagagcccccgacccagagcctcggggcgcagtgcgtacagtgtggctgtgcaccaaggccaccagctgttggagactttagcatggtgtagcaagggatagagtggtactgtttgtgcccagtgaggcaaggctgctggggccagcaaaggggtgagcgggaggccctgcgggatgggtccccacggcctctgagcaccagcaacttgaaggcctcatcctggtggttgccctggtccctggctacgtgtcagcacgtgctgcacaactgccctgtctgcctgtagccaggggtcttcctcctgggccctctgcctgctccgggtggagcccttctgtttgacgattgggtgatcagtgttcacttgttcaatgtcacatgggagttgcagggggctctcccacaacggtggggcctctgtgggaactggggagtacacacttcggagtgcaggcctggactgagcctggggcccactgacatgggcactgagctccctcgtggtacccctaggccccgcatagggcagtgcactggctgcgttggaggttcaggggcactgtgctgcttgtccaggtggccctccctcccagccctgcacagacgggtgagagggttcctgtgggctgggaatactgagagaggtttagcctgggcctcagggtggcactttcccgcccttgctgtggcctgaccgcgtgttgcacccccagacaggacagctggagcccctgctgtcccggttyrctgaggaggaggagctacagatgacsaggatgctacagcggatggatgtcctgsccaaggygagctgtcccgctcgggcagagggtaccygggactcgtggagaagagggcacctgcctcacttgagcaayagttgctcccactctcccacccyctgcgcctctcagaaagccacagagatgggcgtgcggctgatggtggatgccgagcagacctacttccagccggccatcagccgcctgacgctggagatgcagcggaagttcaatgtggagaagccgctcatcttcaacacataccagtgctacctcaaggcaagcccccgctcagcccctccctgcctgccctggggcttggagaccccacaggaggggctcctctcatctgagctccctggcatttggctggttttacactcagcacccaccagggagctcaygggatggaggagggagtgggccgtgcccccaaggggttgttggggtcttctgcagcacagctcacccagcgggccccagggtccaggaaagagccccttaggtggtggccacagccaggcctgcagaggaggcygaggccagggtgactgcctcagagtagcaagaaagacccgctgcccgcarcctctcccctggttctcagaaccagccaagagtgtctaaggagcaggaggaagacaacaatctttatgagggtccactagatgtacccgacaccccaaacttggaaggyrtcacatgaccatttcctccagcrtgttttcagttcagcgcccctaagaacctcctgaaagctttgggccctccccggaaagactcacccaggatgtcacatgtattcagggagcccaccctagcctktgggccccaaactgctcagggatgttagcaggtccagagctctcaggggtgagccggrtgcccagaggacacagggtggcatggggaggggtccaggcaggagcatgcagtatgcacccctccyggtcggcctgggagtctggagcacatgatggctgctggcgcctgggctgcmcccayagggcygtccacaggccacasaggaagytgcagaygtccccactgccattgctccttggrgacagaggttggagrmccatcctcacccacacctgctccaggtgccctgagctgcacctccccaggcagctgctgcccagccctggtgactgcacctgggcccaggaaggccccatcctgctgtcacttgggcttgcccaggctccctgtgacttttggccctggccccacaggatgcctatgacaatgtgaccctggacgtggagctggctcrccgtgagggctggtgttttggggccaagcyggtgcggggcgcatacctggcccaggagcgagcccgtgcrkcagagatcggmtatgaggaccccatcaaccccaygtacgaggccaccaacrccatgtaccacaggtgcgcagctctcccacccctctgtcttctcagggcagggcgccaagaaaccaggcctgagggagaggcttggagactgaacttgtcagccacatgtgtccccaggtcagaactggtatttcctcagcttttatgtcatgtgttactttttcaaaagcattaaggttattcttttataaatatagaaaagcctattgaacaaagyaaaattggccacagttccctgagcytgctcctgcagacacttagatccagagatgtgcatgaacacccggtcctccccaccctgcaggctcagcctgtttrcttttcagttcacacagtgggatcgcccatcagctgttctgcacctgcttttactgctctagtttcttggtgatcttttcatgtagcacaggctggccaaccatgggcttttcctcttagaggcgtgtgtgcatgctgcaaattcagagagaccccaagtgtctcctggttggctcccctcctgcagccgctgtgcatgtcgtgccacagcgcacacatctscgccattgttttttgcgttgtagcgtgtcctctgcccgatgtgtttttcatttcgcgttccatctgggtcctcttgtgtgggcttgcagagtggtgctgtcaacagccagcatggagtgcccggggctatgtgtccagcatctttgatcttattggtttttagtctggttattgtaayggactcgctggacataccgtcaccctctgtggtacacacgggccgtcaggggttttgtgtctgaggatgcagctgtcctaggttgctggaaatggaattgctgggtcagagagaacgtgcgygtggtcaagcctgctgagtgwcctcrctgcaggagggccgtactgctcgggcttcctggtgcaccgggatgcccacccccactgtgccctacagggacctgcttcccttttatttccttkcagggccaggggtgcactgtacgatccctccccagamgcaaagctgtgtctgtcatgaggctyatgggcatgtttgggctggtccccagagtcacagcacgtttgatgcagggactctgcccccmcagctggttctgcgtgaattgtctggtcccagacatcgcttttgcttggttgctggtctttctttttcatgaggtgctgggaggggcagatgctgctcctgttcctyctgatcctgtggatacccttggaaagagccagctcamtggatggatctgggtctgccctcggcctcctctctgtgcagctggtaatgagaggtgcaggcagccacaggcctggaactgggctcacatggcactctccacaggtgcctggactacgtgttggaggagctgaagcacaacgccaaggccaaggtgatggtggcctcccacaatgaggacacagtgcgcttygcactgcgcaggtaggtgtgccccaccctgcaccgaaaccccaacctgagccgttgtctcctccggctggggagaggtggcagcagcgcagagctcagggtgggcagagcgacctgctgggtggtcgggcatttgtggggaaaggctggtgaaatgagctggagggtggcttcagtgggcaggcccaggcccgctggcgttctggacatcggactgtgagagcacaatggctttttgcagttacgttggtttttaaaattaacttttttytttttttgagatagaatctcgctctgtcacctatgctggagtgcagtggcgtggtctcggctcactgcaacctccgcttcccaagttcaagcaattcttcatgcctcagcctcccaagtagctgggattacaggcatgtgccaccacgcctggctaatgttttgtatttttagcagagacagggtttcaccgtgttggccagactggtctcaaactcctggcctcaagtgatcctcccttcttggcctcccaaagtgctgggattacaagcatcagccactgtacccagmcttttaaaaattaacatctgacttattaaacttcacaattaaaaaactaaatttcatcagggtattcggatggctcctgaaaggtacaaatgcagtgttggaggccagtccctcaggaggcctccacagtgccacctcattaatacgcccttaacattttaactacatctggaatgtaacggtttgttttctctttaaacatttgtcccatggagcacaacttcggtagaattctaacaagtcaaatgcagaagttaggtgaagtcagttcttggatactcctgtactgtcaccctggtcttatctcatgccttagtccaagctatgcacacaatggggtcctaggtccccctcccctcccagattccgccttcccagggatgggaccccctagaaccctcgggggcctgggcagtggcctcgctggctctcgccttcctaggagctgagcaggagctccactctcagcagggcagggtgccccagatccagggcttgtggcacgagggggctccccaagaagctgtgaagccacagggccaggcttggggccagggctgcagccaacaggacacatcctggtgctgctcgggagctgactcacggctctgaaatcattcagtgatgtccacattcagcctttgtttacgatgctgctactttttcatggcctgaaattgcagcacacccatttttgtgccctgatcctctgctaattgtcatagatgtgtcggtgatgggacagactcactttctccacatgcacaggcctggtggccagcannnnnnnnnnnnnnnnnnnnnnnnnnnnnnnnnnnnnnnnnnnnnnnnnnnnnnnnnnnnnnnnnnnnnnnnnnnnnnnnnnnnnnnnnnnnnnnnnnnnnnnnnnnnnnnnnnnnnnnnnnnnnnnnnnnnnnnnnnnnnnnnnnnnnnnnnnnnnnnnnnnnnnnnnnnnnnnnnnnnnnnnnnnnnnnnnnnnnnnnnnnnnnnnnnnnnnnnnnnnnnnnnnnnnnnnnnnnnnnnnnnnnnnnnnnnnnnnnnnnnnnnnnnnnnnnnnnnnnnnnnnnnnnnnnnnnnnnnnnnnnnnnnnnnnnnnnnnnnnnnnnnnnnnnnnnnnnnnnnnnnnnnnnnnnnnnnnnnnnnnnnnnnnnnnnnnnnnnnnnnnnnnnnnnnnnntgtgctgggcccagactgccacaccacccaccctcaaacaatcggagttggctttggccaaggaacaaaccagccccaaacttagaggctggaacagtggcatgttctgtaggccaggggtgggctggctcagctgatgcttctgctgctggctgtgcctgtgtccctcctgcgtctgtgatctggggccggtggggcctaatgagctcattcatggctggggcagtaaaggagactgcatcccgggtccagcgtcccacaggccagcccaggcttgagcacgtggtgggctcaggcttccagaaggcctggagagggcaagcctctgcttgtgtcacctttggtacctccctgytggccaaagtgcctcacgaggccaagcccagatgccaggtggagtgagccactgtcctgtgctgggaggagccgcagtcacatggcagaggctgtgcacaccagcaggggagggggcagccagcagtggcacccggctctcgggttcatgtcctggggttgaggaagacacaagatggaagccagggcgatgtggcagagatgggtgcctgctttagactgggtggtcccgggtgatgcgtgagcagcaggcggaactcaccccagggtggggaccccagtgctttgcagaccagcgaagtcgggatacctggatatagtaagctggagatgaaacttgagaactgccactgcgtggatatttcagaccctgagaatctttgtaagacgctatacsgggtggtgtgaagcaggacagagtggaggccccaccccagtatctgagcagtgctaatagatatataatgcaagccacatctgtaatttaaaatttagtagctacgttaaaggaaaaagataaaatgaatttcaagaataattttaattaacccaaaatattcaaaatattacttcaaattgtattccagttgcttttagaaaagcaacrcggcatcgtgcattatttttctacaaagtctcctaaatcccgtgtgtatttgacatttgcaacacatctcgattcagagcagccgccttccgaggactcgggggctggtggcagctgtgtgggacacagcagctgtggggatggggcagggcagcagcccacagagggcgagggcaggggccggagaccagtcataccacagaaccctggaggggcttgaggaagggatggcaggagagctgaggagcttctctgccctgtggggcaggctgctgggtgggtcagggcccgaggaagggctgcacctccaagaagggagctagaggagaggtgagagaggagaggggagggaaagcaggtgggaggccttgttggcyaagggctgaggcctccccagggagacgagtagggcagcccagcagagtcctgctgggaagaggcctcactggggcagggccaggcagagcccataccccagccccaccttgcaggggatgaagtctggagagtgcagatggggcacctgggatggcaggacaggctcagagctgggacaggagccctgtatccctgcacyggggacagtgtcctggaactggccctcagttcctggcttcacctgcacaggatggaggagctgggcctgcatcctgctgaccaccrggtgtactttggacagctgctaggcatgtgtgaccagatcagcttcccgctgggtgagtggggccctccctggtgcgatggggtacggtgctgggcctgggcctcatggtgtatctgcccccatgcaggccaggcyggctaccccgtgtacaagtacgtgccctatggccccgtgatggaggtgctgccctacttgtcccgccgtgccctggagaacagcagcctcatgaagggcacccatcgggagcggcagytgctgtggctggagctcttgaggcggctccgaactggcaacctcttccatcgccctgcctagcacccgccagcacaccctyagcctccagcaccccccgcccccgcccaggccatcaccacagctgcagccaaccccatcctcacacagattcaccttttttcaccccacacttgcagagctgctggaggtgaggtcaggtgcctcccagccctgcccagagtatgggcactcaggtgtgggccgaacctgatacctgcctgggacagccactggaaacttttgggaactctcctcgaatgtgtgggcccaaggcccccacctctgtgacccccatgtccttggacctagaggattgtccaccttctgccaaggccagcccacacagcccgagccccttggggagcagtggccgggctggggaggcctgcctggtcaataaaccactgttcctgcagctgagagccctttgccctcacacagggtcagctctgggcaacaaagagggagtggctcagacagggtcagagaagtctcatcccagactctggcttccagcatcatctgttcctgggggccaggccctgcgcagacctggccacccagggtgctggacacccccaaccctgactccacaaggacccagcagggcccatgggcccaggccagcacggaggggactcatgcagatgcagaggccaagctccccaggtgggcctggcacgcctccccgcagggctcctcctcaggccattcctgccaccctgagtcctctaccccagtgacctgcatcaggctcctcctagtggttcccacaggacactgaccaggctgcggcaggcgcatacttgcactccgggccttctcccatgctctccagcccccagccccacaaagcaggctggatgtggtcctcatgccctggggcttggatgggggcccctgtacagatggcagtgacagcatcctgggaccagggctggggcaggaaaggctggagggtcccagtctccaggcagggggaggggtggtgggctgggcacacagcccaggaaggggcccccaggtagaggcctctgctgcaacagaggtgggggccctaccagggccccggttatggcagaacctgcagctatcacacaagccacatgtgggccacactgaggcatctttatttctctgggtcacacagagcttgggcctgggagcctcttctgcatgggggctgcagctgccaagggagcggctgagaccagaacaagcgctcgagtgggccccagtgcaggttgggatgtgcccggtggagtaaggtgtgagaacccccagcctcactctctgcctggccctgaagcagacagcagcaggctggcccagcctcccctttatgagactatcctagggtttgacagcaagtcccagatgaagggtgacaggcagctggggtccacctggtctctcctcagcagggggaaccccctgcgggcagctgggaaggcagtggccaaaggtcaagaagatgaactctgcccagacttctgctgcctgtggctatggtgggacagggctgcctttctggtcacactgggcagcaggcaactgccagggacctcctagccccagggctgccttccctgcccagcagcccctctgctgcagcttccggatgagttccagcaggttcatctgcagcatcagctcctgggatacagaggggccccatgaaggccagagtgatccccaggcccctttcatcccggcccaaaggtgccaggcagtgagcccacggggcgaccatcctgtgaagcctggtcatggcctgctacgacagggtggaatctgagcttctgcccccagcagggccactcggaatctgagcctctgcccccagcagggccactcggaatctgagcytctgcacccagcagggccacttggaatggcatgcgggaggggagcagaagagggccctgtggggcacagcaggcctggggagggtgggcagtgcccatggctggctggctcacccccctgtagggaatgggcctggcctccatgctgggaatggcacagaaatcctttccagagcctcaatccttccacttcaccccctataccctgagcctggctccccagggaccagcagtgaaatcccagatggaatggggcccaggggcactcgggctaggacagagcaggcccaggcactgacctgtgggttggtggtcacgtagaagccagccacccccgccttctccagtgtgctctgctggtcagccaccttccggtccagctccaggacgatcttctggtccatcgcccgctgctcctcacggatccggtgctccaccgcctgccgtggggccgggggcggcgggggaggtgagggcagctcaaacacatgctcctgctgctgtccccaacagcaccagctctgacaccaccaatgcatcctcaccacaccgaggcctctcctcggccaagtgaacccctgaagggggccccaaggggcttccacgaatgctttgacttgggactgccttgggaccacacacacatctccgcaggcacaccctgccccatgacttgttggttacatgccggtctctggttgtccctgtgctcccggggagaaggatgggccccttcctggctggccccatcaccccaccattgcctttgtacccccygaggccacctgctctgcggagaccccaacccacgaggggcactaatggactccaggggagcactggtgggttctcaccctccacccagtcccagcacacctggcaccctcagcgaggagccacctggtgggactcactaggcctccagtgtcccactcaggcccagggtagccacccacacctgagccccccacaccccttcagctcagcccagtcagcagagccaggtggtgcccacaggagagctgggccggccaccctgcctgcgtccccagtacctctagttctcgctgctgagccgcctgaagcacaggcaggttatggggccggcaggcctgctgggcttcctggtgcttctgccgcagcgcctgcctgagcactgggagggatgagagcccgtcagcaggcggtgggactcggcagcagccctcacccatgggcacctgccttaccaacccagcagagcagccaggccaaaggggtgtctgcactggggaggacgccagcctcctccatcctcccaccccactgtcacggcaagtctccaggggattccagaaggtgcggggcactgaaagagagtgggggtggggaagactggccaggtggggccaaagctgcagccccagacccagggcagctggaggaggcaggcgggagggaggctgcagtctgagggcttcagggcccccgtggccacaggccataggacatctactcaagtgttggagaccacctcaggcaaaggcatgggaaaggagcaggaggagcygggtcgctgaccctgagcgtggggcctctgcctaccaggtgtgtggttggcccctccacccttkgtgctgcccttcagggtgggcagccccctcccccatttgcagctcccagcccctacacagcaccagagggagaagggtgagctgacctgggaggcccaagtttgggatgaacctggggtgtcataagcctgtgaggctctgggccagggagtctgtgtggctttgaggggctcaccctcggccaccaagcaaagctccacggtccctgctaaactgtgcacaaacacagatgtgcaaactctagtctgaagggagtgtacagaggaagcgatcatgggacataaaccatcatggcaaaatggaacatggagcaccccgcagctggcgccagtgcattaagtgccaaatggctacagttccccaggaaggaggggtccctggccacaacaaaacgtgaaatccaacactctgttcctgggaagagccctgatgttgcagctcttctctggtggcaagtctccagggaactccacggcccctgaggctcccctgcaggtagcctggctccagctgtgcctgcagccttccccaatctcctgtttcttggcattctgtacacacctcgacgatggtatttaccaaaagcccccctcaagacagctccataacacagggaagcaggraaatgtcatcwtcttcactctactgatcaaacattgctacaagtgccaggtccactacgagattccactagatagacaaccaaaaggcaagaagagagccacgccggctgcctgggcagaaggggcctggccttagacacgaccgggaacacaaaggaggcaggagcagccagtcacccctgccaaatcagcaggagaagcagaaagtcaacgcaggcatgcctgctgctggtggaaccaggacctggcccaaaccttctgaagcacaaacagcattgggcccaggcagttactgaaactccccatcctgctagaaagaactacaactctgtggaaaaatggccgattccaggactgagacacggagaaaacaagaaaagatgagcctgaacacatacctgaaccagaaagcaaggaagtgctcacagaatgatgaggcggcatctaaaggtgcctggagcgcccccaactggccacacatggcacagtctgagcattaaggaataatgagccatgcacttgggattagtaaactgcatgcatcttacagctcaataaaatttttaaaaagacagtcacccagacatttaggggaagaagtaatgccaattctacacaaactcttctggaaaactgaagaggagagaacacttcgaaactcatcctataaggctggcaaaaaccctgatacccaaaccaggtattacatgaaaactatagaccacagtttatcatgaacatagacaaaaaaattcttaacaagattttagcaaatcaaatccagcatacataaaaaggatactacagcacgacccagtaggatggaattcaagtgactgtaattcactgtagtaatagaaaatgattcaccacgtgatcatctcaagagctgccaaaaaggraactgccaaaatccaacatccattcttgatagaaacacaccaatcctggagcagatggacactgcctgccttctggggaagggggccttgcaccgctaggaggaatttttgccacattaaacctgcctctaatcaggctcctaccagcagtccagtgtacagtaaacccagagagtggagaagcaggttaaatgcacgaggaagcatttcctctgatagatccagagcagggcattctaattatagaattagactctataaaaagtcaatgccacaataaatgttggggactgttccagaagcaaagagaccaaagtaaccaattgtagtacatgaacttggactggatccttacttataaagcaacaatttgccacaagttaggtaccatgatgtggccatgcactgaaagtcaggagacacctggaacagttaatttctcagggggctaccctctgcagctgtgtaggagaccgctcttgttctagagcacttgctcccaatccaaggccaaggttgaccccaccacccaggttgtctggaggcattcttggttttcasgactagggagggtacccctgccatcctgcaatgcgcaagacagcatctcaccataaagacttacccagccacaaatgtcagcatggctgggttgaaaatcctggtctccaggaatgctgaagactcttggtgaatgctatgctgtcacatgtatgtattttgggatgtcaagaactagagcaaaatgttaactactgaactttcggtggagagcacaagcgtatgcactacactgtcttttcagtttttccaaatgtttgaacttttaaaataagaagtttgggaaaaataaaacagcaaaggtggaaatctgatggtgcagggggacctgccctatataatttgcaggaaagggctccgaagcccaggaagcatgcggctcaagtgggaagctcttctggtttgggagggcgccacaggagacagtgcttaggaatttgatgtgcaactagaatgaggccctgcaggcctgagagggaactgaccctgaagggcgcgcacagctgtcaacagacctccaactacccaagggcgctgctcagctgtcaacagaactccaattaccggagggcaacgcagtcagatctaccaccagagtcagcctgccggccaaccaagcacggaggcctagggccatcaggcctggaagggggtggggcacagggaagcccgaacagggagtttctgctaagaaggtgggtgctgcgcaactgaaaacaaaactcgttggacacattggtcaccaaaaaggcgctgtctcagtctctgcgcccttgattttgttaatcttagggacctcttccgaacactcccaaggaaggagccgagctgcacagataccaagagctgccgggaggcgccgaccccgaggaggcggcacctcctcccgctgcccccgcgcacctcgatgctcgttctgtaggcgcaggcgctggttgtacaggctcttttcggtgaggtgctggatctccagtagcccctgcacgatttcgaacacggtgccgtcgagaagcgccagggccaggtcgctcagcgtggtgtaggacaagcgctgctggaatgagctgcggggtagaggagcgcggtgagccccggcgggacacgatgcggcctcggcaggccgccgcccgccccgcccgcgtacctgggcaactccttcaccaggctctgtaacgccgacagcagctggts

SEQ ID NO: 93654 - DNA, 38464 bp, Homo sapiens
tgcacacaaaaggtactcaagaaatgtcatctgacaatttcaaacaaactttgtgaattgttccttaaaagttcttttctcttatattgttcaaatgttccttaattttatatggccaccttcaccaagtgaaagtgctaaaaataaatgtcaattttaaaacatttgctaggcagatatgctgaaaaagatccaagtgctttaaagtataccactgaatttctaagtgagatacttaataaaaaagagaccaaaataacaaaacttcacattaagcctcttcacattatgtgagataatacataacaaattataatttagcatccctgatcagaataattaagaaaagaggtagaaaacttttatctggaagatcttgtagtgaagctaagttttagagggtgtgccttgcggattagtccactaagcaaatggctacacatctagtactaggaagaagcagaattctgagaaagctgcataaggcaaggatttacaattttttctattttggaagtgaaactagttcattcaacagtattactccaattgctttaaaacttcaaaaatcaaagtaaaagattgcagataagcaaagtgctaatttgcagaaatgtgaaattatttaaaataactttagtggagggataaggctagcacaaaagcaaacactctttaggtgtgcaaaaaatcttacaaaaaccaacccaaagcagagcattattacttgaaaaaaattttttggaggaagtgctcttaacaaaaagctgagaaaattaaatcccccccgataaactttacgcaaatgaagaaaaaactgaggactcgaatttcaaggaatttcaattaaaaaagtaccctgcttaactttaaaatgttatccaatgtgacaaagaccaatacatgaattgcattaaaacacgaggccaacggtcttttaaagcttcaggaagctgctcaggcacctattccctcatacattctaygttttatatgctagagatcttaaacagggcacaatcagttcctgttttgtgataacattctcaaggatgagactcatccctgtaaaaattgcttgtgatgtacttatcagtggttaagcacacatttataatgtctaccaaattgcaatataaaatcagtttggacaattctgagtatcttcatttgatgaatcaattcataatttagaaacttaactcattcagagtttttaaaaagactcagttactggagacactgtggtaaatgtccagtggactcacaggaggccttccacattacccaaaatgtgatgctktcttctacaagttaaagctgctgggtgctagtttataatactcaatctcaatcgtatgcccagtggactcacaggaggccttccacattacccaaaatgtgatgctttcttctacaagttaaagctgctgggtgctagtttataatactcaatctcaaccttcaggtcagtgtcagtaggtggcaaggatcacctattctgtcactccagcagaaagaggcatgtatgtacagtttaccactgtagacacacatctgtaaacttgcacactaattttaatcttaacaaggaatttcagtgtcttagtggttttaagttaaaaggatggttcaagcattgtatcctttgttctttagggttaccatagcttattggaaaacccagagccttctggatgtgtgaggtagtaggcttcaaccctcattcatgcataggtcacacttctccaaagttggtatggcctgtctccttggcatgttcccttgcttctgcttgtccagttaatcctttctgacataccatgcatctcagggtgaagcggttgacatcagtaaactgtctccttcttctagcttcatctgctaattccagtgcttgtacaagaacaatatcatcattagaggagaaaatggtcagaggaggtgtatctggatcagggaagttacgctgaagtggatcatagtggatgccatcataaataagcagaacccttttggtatatcctgcatcttccccaaaacgatcaattcttactgtstgtgtatccactacacatatttcacattggtaaaacttggacaaaatcgatatctctattgctcctccccaagtgtcatcccttttgatccagtcacagtactcttgatttgtttttcccagtattgcctcactatagaagtctggatcgcttgctacaatttgtgctatgaggcgtctcatctcaggggcacaagctggattcaagactcctccttcgacgacatagtacacactagtaaagaggcaagagttgtctgctgggaccacggttctggtaagcacaggcaaagtttccctgacgtaactagaagcaccacgtttagtaaatgcaggtgaacttctgggcctggtttggtcttcttcaatgatcagcatgtcacctgttaaaaataaaacaaatcccgatctgcaaagaaattacagaagaaaccgagtgttctctagccaagtctgtaaattacaaactgaaggagttaaagcataaactggggttactaaggagaatacagttttgcaagtaagttaccagtaagaatctttgttcactgaattttcataaagatgaaaaaagaacaaaaaacacttgaggttgcatcccaatttagtgaaggggtctggagtaaacaacttcaagcttacctaaaaagatacatttcaaaaacaaaatttcctttccttatacagtattttacagaaggtgctcactacagagtaggccgctagggggttctccttctccggaaacttatctactctagagtgtttacaacatccttgatacagcaactgaaagcttttaattataaacactgatgttcaagttttgatatggcacagaaataactgctgctggttagaaattgaaagagctttcagtgggtgttttaaaagctaactcgaaaatgagtatgcctgtcaaacgaagtatctacgaaggggactgcaaaaatgaatcaagaaaaaaaaaatcctgcacccttgagatctcatcggtgatatagggaaaaagagacataaggacagagaaaataggccctactttatatttttgtggacgccgagggaaaacaaaatgggatagtttcaaagccgaccagaaagcggaatggggaagggggtcttcaaggctttgggttccctttcaaccctgtgtcaagacaaggagttgctagacacttgccctggcccccgtcagcattctctgttctttgatctatcctcgcccctggcctcaaagcccccccgccgactcacagccaccttgccttgactggtgttttgttctctctcacgcccctctccatcctcccgggactttccctggccccagccctgattccttaccagattggatgggcaagtcttccagaatggtatccccattgctgagatccaggcactcgggagggtatccgacgaggattcgctgaccgccgggggcgatcccggtgatggcggcaatttggccctggagttcccgcacccgggtccggctggacagcccctgcaaaacatgggtgccgtccttggccttgcagcggagccgccacatcgtgtcggtccggctgcccacaggccaggcacccgcggggccagctttggtcccggcagcctgttgggagacgccgccggggaaaccaggcgccgggtggactccaaaatggcgacctttagcggggccaaacatcgcgagaagttgcgggtggttgcagttatcgcgacgcttcggtgcggcttctgccttagtaccttagcaagcgcgaactcttttaaagtgacaactgatttttcccccaccctcagaacgaagatgtaaacctccgtattcctaaaggacaacgggtcttgctacctatagagcgagtgaggtgccctccgcgtgggtagcatatatgctcaagaaaagagggcgggggaaggagttcctgaatgaaggtctggagattggaatgtgaccttgcacttagtgaggtcggaaattattaaattggggcttccacactacacccagactacaccaggagaaacagaatcatagttcacaacgcaaacgaatgccaggaatggtcagtgagtcaaaggaccagtcaaaaacaatcacacttgtgactagactcgtggctgcattaaacattgactcattggggttccaggggccaaaagactggcctttctgcctccctgggactgtgcttgaaaacgtctatttgccacttcagaaagcacagtatgaggtcagcatctgggcccagggcagctgcctcattcaggtggtggcagtgtaaggaggagtcgtgtaacgcgtgtcatcagattccagttcagttcctgggcatacaaatatgaagacttcattcctgccttcattgtaacaagtattcattgcagttgggagacagggtggggtgtgagacacacagccactgaatttcaaagcaacgtgataatgctagattatctgtaccttttcaaacgtgtatgcctagaacccaggactgtgcctcgcaaataaaaagtgttcaacaaatactggctgaatgaataaagacagagttgtatagacatagagagggcaactagagcactctgggagttgtaaaaagccttaaagaggagataactgtttgaacttttggaagaattagtttaattcccaggcgaaggaggaataaagacatccctgaatttatatctctcttttccaagaaatccatactcattgttctttatccagccgggattcagacagcaagtcccacttgccaagagtgggtttatcaagcatcaaacgggcccgctggggcaactatgaaaagtgtagttcacttggtgcaaactcacctccactgtaaaagactttgcttctgaataaattatatgtaatgtttccatcttttcacatctttcatgactcaatttttttttgctggtgcaattttcctccttggttcttcaagacgactgcaacggatgatacagcctgggttagggggtaggtaggagggaaggtaggagtggttagaagtccaccggggtggccgggcgcagtggctcacacctgtaatcccagcactttgggaggccgaggcgggtgaatcacccgaggtcagaagttcgagaccagcctcatcaatatggagaaaccccgtctctactaaaaatacaaaattagctgggcgtggtggtccatgcctttaattctagatactgggaggcaggagaatcgcttgaacacgggaggcaaaagttgcggtgccaaggtcgtgccattgcactccagcctgggcaacaagagcaaaactccatctcaaaaaacaaaaaccaaaccaaaccaaaacaaaaaaaactccaatggggtgtatgggtgggtccagggaagcttctggttcaacgatgagagtggttgattttcttaggtcacagcgtctgacctgtggagccgggtatgtatacaccctaaggcataattagctcaagtgttgtggtagtttattctagcaaaaacatctttaaagcttacgttcccatttatggatctaatgaggttctgctgggattcaggaatgagagcgttaatctttgcagcattttctcgtcacccggcacacccgctctcaagacgcctaccgaatagtctactctcgcgagagtcagaaaaaagtcaagctttttattaacaccgcccccagccctattagttaccaagcaacagtgccaccaggctcctcggcgctgggaaactcaggagcttgtgatctctctggttccgacttccagccgccttcccgagccagttaggcgattgcgaccctgccccgccccctgggtcctgcaggcgcccgattggtrgatgattctctccaggtgaggacctacgcgcgagggggcggggccagacgggctcacatgatttgccggcgactgtagcgccggtcccggccacaagctgtcggctcggttcggtcgcgttacagggcaggcgccggggccaaggcagggagggatcttaggagagatcgtagggtgagccacagctgcgcagccccgggtagggtctagcggggcgggatgtgggggctgcgtgcccccggatgaagtgcggggagaggtgctggtccccaggcatggcaggcagcgcggacgttctgggaccgggagccacagtctgtgtttgggttggaggatttgtgtggtcagtaaaggaatcgtgtaaggctcttgaaggcgcaggatcttccgtcctcaccagccccctgttgtctgaattgggggcatgagctcaggactttcccactccagtttgaatcagggcttamccctcttcctgaggtgamcttggggaagtcatttaccacctcagcgctccggcgttctttagactgagtcccgggggtaactagggagagggtgcggagcagggcttgagaatgcactagaggagaaatgamgacgtgctagggctgtcttggggtccagttactgtttttccttcagggaatatgttcgagattttcccacgtccctcacttttttcttttctttctttctttttcatttttcattttttttttttttttttttgacagagtctcgctctgtcgctaggctggagtgcagtggcgggatcttggctcactgcaacctccgcctcccgggttcaagcgattctcctgcctcagcctcccgagtagctgggactacaggcgcgcaccaccaggcccggctaatttttgtatttttagtagagacgaggtttcaccatgttggccaggatggtctctatctcttgacctcttgatccgcccgcctcagcctccccaagtgttggaattccaggagtgagccaccgtgcccggcctcactgtttgcaaaactgagtcctaccgttagattggagttaatttcctggtaatgwacttcgtctatacataacccaccccaccccaactgctgccactactctgcccagattcttaaaactagaatctgaggtcatgaaaccttgagcaggacacttaattcgatgaatctcaaattttcaatctgtaaaatgagaagaaataatggtggcaaaatctgcctaattacaagattattgttaggactgaagaagataacgtctgtaaatgtagactcgtaagtcagaagataaatgtaaggttctagtgcaactctttttataggtgaggaaacagagggctagagaagtagctgctaactgggagaaacaggactgaacctgcctcttggcccagggtgtttttacttataccacacggatccaatgcactgactttttttaagtkatgtcttctttcttccccttcccttttttacattctacttctctgtttcagacatctgaagagctgccatgtctggggcatcttcctcagaacagaacaacaacagctatgaaaccaaaaccccaaatcttcgaatgtcagagaagaaatgttgtgagttctggcagagaggagggactgctctctctcagcattttatcttgggaatatagttataatcctggactctgctgcttggtgggagtgataaataattatttgacatggaaatttaatgcaaagtctccagggtagaatgtcctgtctaaaacaagtaracttagtgaaatgtctgttcttggggcttgactactggtgtagtccagcagtttcttactgctttcttaaactgaatctctgtctcctgggatgtttgcacactggcttgctgatggaagttagaactaacattattgtacacacaatgagtaaggcacagttgcaggtgcaggaattacttggagctggtaatgttaccagctttatctgttgggctaagttttgggagagtgctgctcattgtagaaattgcagatgggagccagtgctgcttggtttccttcctacaggcctgaggggaatgagccctgacacttggcttctcacagtgtcttgggcatcttactttctcacaggtttagcctttgtactttgtaaactattttccctataggttcatttttttgaggacagctttcacatgagcattttcatttctatgcctgtcttttagatagaaacagcaggagggtttgcgaggagatgaagcatcatttcctgtccccaagcatctgtatttmtaagcatcataggctgcatagcttcccaaaagatctgggactctgttccccacatattttggggaacttcaaggaatgmtaactcttgcctctgcttctggatggcaccattcctgcagaatcctgtcagtcagttcttctcacttcagtggttatatatatatatatatatatwgccagttagtcaaggaatatatatatctcagcaggtggaaacagccgaccagcatgagaccaggaattatctcatgttcaaagcttttcccagagcctcgaccttgatgtcatgcccttgtcagtttcatgattgacaatgataatctctcttcacctagcacccatggagcctgctggacagaagcagctggctggatgtgatactggggttggcararttagggtctacaattagggtctcttttctctgccagggcaagaagccaggtgctaagggcaraataccccatgagagataactagtatagcatgatgtttgagtatagcctctggagtcaractgcctgagtttgaatcccgggtttatgacttcttagctcttgaacaagttgcttgttctctccatgcctcagtttactccttttaaaagtgggaatactaacagtgtctcccccaarartgatgtgaggattaaatgactaaatgtaggaaggcgcttagaagagtgtkgggcatatatctaatgtgtgttatttttcacaggtgactcaatctgcctgttgtatttattcctgaaatgtttatattgaatcatactcaaatgctgtattggaagctcactatttaaaagagggctgtgaataattattttttcagtaaaaaatgttttcttctcttatttgacaatattgtaacccagatttggggatctaggatgcacctcttacagggaggtacactaatgttactagggtgcttgatccaaaagagagctggggctggggggcaggatcgataattgtgggagtctctgactacacgatgccatgtgtcagtccttctagctttgcttttttctccatggtaggaatctcttctacctgctttcctaactcttctgtagttcctttgccttgagggctttcaaktcagggaagcagtaatccctggtttctttcctgtctyctaractctaattcctgctctgggctctaatctctttttttccatactctagtttctctaaatgcctttttcttctctaagaagaagaaggtgtcctaaagccactgtgatttatttaccctattctctcctcacgtcacagtcgggctgtgagactgttgcagacatagtcaaaggagaaaataaagttatgagtatatgtgttaacttacttccttttcctctgctatagagctgtactttggagctggttcacctggcagcttagtgttcacatcagcggctgctttattaatagcttaaccgttgttcccttgctgctcatwacacctgtgttggctaactttgactccgggaagtgactgggcttgaggatttcagggctgaagaatgactttagggagccaaaacctccgaaggagcattactgggacttcaactgctccagggatggggcgaagaggggctactggccgaggtgcctttacggtgctcagaggactggtttcagggcttatgaaagcagaaatggagggccgggtgtggtggctcacgcctgtaatcccagcactttgggaggccgaggagggtggatcatgaggtcaggagatcaagaccatcctggctaacatggtgaaaccccgtctttactaaaaatacaaaaaaactacaaaaaaaaaaaaaaaaaaaaaaaaaactagccgggcatggtggcgggcgcctgtagtcccagctactcgggaagctgaggcaggaraatggcttgaacccgggaggcggagcttgcagtgagccgagatcgcgccactgcactacagcctgggtgacaaagtgagactccatctcagggggaaaaaaaaaaagcagaaatggagaaatctacatgctttttttttttctttttaatttttttttttgagtagttctggaacagacaaattcttccatgtacctttccctaaatacaaaagcaatgtatgttcataaaaaattcaaactacagaaaggatttagaaagcgaaaagtaaaagactcctgtttcttccaaatttgattcttttagacatcttattctggtatatcctattaataaaggtaggttcatattgttcatattctgttcagctgccatttccttttttatttttttaaataagttactgtcttgtggacatccttttaatgttgataaatgcagatttacctcattctgcattgtatggatatgccagctttccacggataggtatttaaattgtttccagtttttcatcatcacaaagagtgctgcagtgaccattcttacacgtacacctttgcacatttgtgacagcaacttttcctacagaaataatagaaaagatagacacattggaaatgttcatcagtattactaatttgctctcctaagaagttcyatattgtaagctgttttcaatattttaagatatttgatggaaattgggcagcatcaactatagccatagtggttaactgaaacatcagctttcttagtgtttgaccgtagttatacgaacttggttatttcatgcctgtcaactggcaggagataatcagcagttctgacttctgatgaataaagataaaatgtcactaatgaaacatgctttatgggcagcatatttctaaatattaggcctctttagagccaataaaagaagacgtcctgggtcctgaaaaggctgggaaccattgctctcctagaccatccttcaggattagaatggagagcaagttgtgtttaccgtgagggwacctttgtcaagtgctgacatgaggcacaggagctggcagctgggactgaatgggcagtcatgagatcaggagactggtcagaaccctgaccttgactgtctattgtgggaccatgggcaaagctcttaatttctccaggcttgagtttttccatttacacgagggaagttatcaagtcctcattttttttgtaaatctttttttyaaaatacatttatttatttattttgagaccgggttatgagactggctaatttttatatttttagtagagatagtgtttcaccatgttgccaaggctggtctcaaactcctgggttcaggcgatccacccaacttggcctcccaaagtgaggattacaggcataagccactgcgcccagcctcaagtcttcattttatctaagcaagtttatgaaaggaaaatgagtttaagtttaagaaaaggagttgaacctggcttaaagaaggtggaagarratttcaggattgaaacagttttccattgtctatcaagagatgggttacattgtctctgaaattaatcaggtggcagtggcaggtggttttgttttttaacaggcaggacagaatgttcctacttttgccagtgtggtaatttgagataggaagtgtggtttagttttgtactccagaaaatgagaagccctggttgtagcaggtgtgcttaagtgtattctggacagaggcgagaggtgcgttgctggagggctcttgggaggtcccagtggatgcagttttttgttgttgttgttcttagcattctctgtccacatgggtaaacaagagcagctggttccctggttgccttcararcagctcccaagtatcagttcattttaaactttagggarggtaataggaccttcsggggaartgcctaatgggctggaaggtgcggacaaagcaggcctagaagtgcaggtaatgagccaaatcatgggggattgagagcaggcattgagccgagctggagaaagtgaagactcaggggattttactacttaaacctgagacagctgatcccatgcagaggctatctgcttgttaggggccagtgatcagggattaatgccagctgaggcttcagggtacagtttgcttgcctttaagctccctatttgaacacagatgaaaatcacttatgttgctcctttacctaccttggaggggctcctgctgagactcaggaattttccatgtgtgcagtgggtaaaggactaaaagccaagccctctgaccccaggtstgggcctccatttctccctcctcaccactagggtcactctgagtacttcttgccaaacacccttaggaaacttttccttccgagggtggttctctacctgggcccctcctcccacttctccattgagatctttctacatttatttctcaaaaaatgaaagtcatatttcccatccaagtacctccattttacagaactgtttcttaatcttacaaggtcccttagtaccaggcagaggggcagccgcaacttgcagggcaccttctgggaagcagtggtgggaagtgggaggtgaaggtgtttcttcctttttcccccatcctgtgcagggccttccctcattggagccggcagagcctgagctatcccagatgacctcagtgtggtttttggccccgggacagtggctggcagcagttcaggtccttctcccacctctcctctgcagcaagatgggccgggaggagccagcccctgtgagcaaagtgatgaggaacctctttttatggagaaaagctgcaaggaagcacaagatctgtgttctagtgccagctgtacccttgactcattatgtgtccctagacaagtcacctgtcccctgaacatgtagtttgccctgcctgtccagtgagacttatctctgcaaatgagcattcctgaagtaagttaatttactaaggaagggtagactgaggactgttaatgcttctcaattgtcttgcttttacgtgggccatggtggcagattggccctgatgccctttgtgggctggctctaccctgaagcttcctgaggtctattcagaatgtgtatcaagtaagctttgccaactcaatctcactatggtttagaaattctggcttaaagaggagctcatgacctgagtgaaaaggccaaaacagcttgaggcagggctttttgcagtgggcaagctaattcttgcccatggttctgaagggatgagtgggatcctggagacagaaactctgttggacctattataggagccagctcagttctgcactggtagaatctccaagcattagaccttccttcacagctctgtcatttttatatttctaggcattcttatgttaaggatgatgtcattgttacttttctttctttctttctttttttgagacgaagtcttgctctgtcgcccaggctggagtgcagtgacgggatcatggctcactgcaaccttgaactcctgagctcaagcaatcctcctgagtagctgggactataggtgcacactcccacatctggctaagttaaatatatatatctatatatctatatatctatatatatctatatcttaaatattatatatttaagatatatataaatatcttaaatatatatattttatatatatctttatatatatctttatatatctttatatatatctttatatatatctatatatctttatatatatctttatatatatctttatatatatttatatatatctttatatatatatatatatatatatatatatatatatatatattttaagagacaagggtctctctatgttgcccaggcttatcttgaactcctggcctcaagtgatcctcccacctcattctcccaaattgatgggattacaggcatgagctgtcatgtctggctgcagcatggttattttctttcttagccttgctacttttttcctctttccaccttgggtactgcagtgaagacctcagacatgtgggaaagacgtatcttggtttgggcattttctggaagcctgcataaccttttaactctatttcaggaggcctgcctgatatctccttatttgtcttcccagacttgctgaacctttsctccacaggtttatgaagataaaatgagattatgactatgaagttcgtagctcagtgtataaaccttactagaccccagcggggctgggygcctcacgcctgtaatmccagcactttgggaggctgaggtgggtggatcatgaggtcaagaaattgagaccatcctggccaacatggtgaaaccccatctctactgaaaatacaaaaattagctgggcatggtggagggcgcctgtagtcccaggtattcggaaggctgaggcgggagaatcacttgaacctgggaggcggaggttgcaatgagctgagatcacgccactgtactccagcctggtgacagagtgagactccgtctcaaaaaaacaaacaccaaaaaaccttactaggactctagtcatttcgttttattttgtttcatttccttctagcatgggcctcctacatgaccaactccccgactctgatcgttatgattggtttgccagcccggggtaaaacctacgtgtccaagaaactaacacgctacctcaactggattggagtccccaccaaaggtaagtgtggctcattccctaggaaagacaattattagttcctgggcctcacaggtctctgggagacttattcttcctggcatcaatgctatagggtgcttttggcagaaatagcagttgctttctggtttactggagttattctctattcccagacttgtctcctcctggcgtgggtggattggcctagttttgagggaatgcctttgataggactgttaagatttagatgagcatagggctgtaccttttcagaagccttacatggacatcatcttatataaccctagcagtgtctctgtgaaatagacagagtggctgaggaaattgaaacctcagacagcttaagacttgtccaaggtctagaaagtcagggcttgaacccaactcttttgactcttaatctgatattgttcccaacctaccatgctgccgcttttttcatccccttggtcactccgacattaggccaagaaacaagtcccatttggtggggccatcatattattttgctgctgaaggatttgggtrtcttctacagtgtttaatcttggggtgtatcggcgtgaagcagtcaagtcctataagtcctacgacttctttcggcatgacaatgaggaggccatgaagatccgcaagtgagtcttgtttaaggcctgatctccaggtcagctctttcttggccgtcatgagacttggtgtgacagggcttggtttcatctcagtaaatatcttaaggggaagttaaatggaagttatctgatgggcaagtgaccttgggcttgggtggtcagaagaacagggctcagggtgattgatacctgtgtgcttgtaggagaagtctaaagagggctaagatctgtgcattggggcaggggcaggaaggggttataggatggtgtgaaaaccctcagtgagaaagttgaaagatctagttagagaaaggttttgaacagtgggaaactaagtgggcagggatgtgacttctgtagccacccgaatgtttgtgtctctgactgtttgagcttagctctccttgctggtttcatttgctcttatggcagacagtgtgctctggtggcgctggaagatgttaaggcrtatctcactgaggagaatggtcagattgcggtaagctttatctgctgcttcttctttctggtccccacccttgcagcagcctggctacccagccccaccttgagtctgccctggtggggttctgtttctctgttcctgctcatttaccttgtgtactttcttcacaggtgtttgatgccaccaatacaacccgggagaggagggacatgattttgaactttgctgaacagaattccttcaaggtaggatctgactccatgttggaggaaaagggatgagtagaggtggggagtcaggctacaggcatggatctctcactctagtgggtgaggacaggatgggatatctgaatctcttctctcagagcattcccccagtccttgagtgttttcattcaggtcctttctcagactgttagcctgtatgtttgaggcccaggggctgtggtaagagctatgaggaggacttgagggccactttcatgaagaaaatcctgggagatgtggtggctgggtggggtagatgagcatgtgctcttaattaacagcctggcatttttgacttgcttatcactgccttctctccatggccaggtattctttgtggaatccgtctgtgatgatcctgatgtcattgctgccaatattctggttggtgacacccctacatatcatctcctcttcaccttttgtgctgtgtgtgttgtggggtgtgtgtgtgtgtgtgtgtgtgtgtgttgttggggaggggtgttttcgtaatgaaagagagaaatagacatgtttaacatcacaaagagatcttttctatctgccagagccccatctggtacttctacactcttctcttgggagaggaaactgaggctttaaggaatcaagtaagaattagctgttgaattgaaaccagggtttaggttgtaggattcttggccctgtgctctaggtattatctggatgttgagacctagatgttggaatagatcagccgggcacggtggctcatgcttgtaggctcagcactttgggaggccgaggcaagtggattgcttgaacccagaaggatcaccttagcctgggaggttgaggccacagtgagccgtgattgtgccactgcagtccagtcttggtgacagagtgagaacatgtccagggaggttgaggctgcagtgagccatgattgtgccactgcagtccagtcttggtaacagagtgagaacatgtctcaaaaaagaaaaaaaaaaaagaatagatcagactcttcgtttcaggacttacctacaggaaggttatctccccagcaattgtccaaagttctcgtcagtgttctatacattgagctccttattccctgtggggtcacaatgtaagccagtccccattggatgggttgtgctctgctggaccgagtagatatctgaacatggtcttatgcaggtgctctcccagccgtaggaacttgggatcatctgaggaagagccatctggtcccaagtcaggcactggggtcatgcaccctattctgagtggtaatagggaaacattggagcctgttctgttttctcaggaaagtacataaagggattggggcccaggagcagctttggctgcgtgactgcctctgtccttcagccaagtgcaggcacatgactccccagttgtcttaacttttttggttgccagggtcacaggacggggcggggcggggcggggggtactcaatgagtggagtgccaatgttccagtgaaaggcgacatttatggacttctttttcttttttttagcagtggctatttgtaggaggactgttacgggcagacctctgatgaggcctttactggttcctatgatttcaggaggttaaggtatcaagccctgactatcctgaaaggaacagagagaacgtgatggaggacttcctgaagagaattgaatgctacaaagttacctaccgacctcttgacccagacaactatgacaagtaaggtttaaggccatggtttgaagggcccaaggcaaaggtctcatctgggaaaataacctttctccctgagttctctaacttccttctgataatctagatctacagtgttaacatcatcccagagaaataaggtatggatttgtggcttttatgtggattgcatcttgtacatgaaaaattgaagtggttggttttgttttgttttgagacagggtctcactctgtcacccaggctggagtgcagtggcaaaatcagggcccactgcaactgctgcccccggggctcaggtgatcctcccacctcagcctcctgagtagctgggaccacaggtgtgcgccaccatgcccggctatttttttttttttttagtaaagatagagtttccccatgttggccaggctggtcttgaactcctgagctcaagtaatccacccgcctcggcctcccaaagtgctgggattacaggtatgagtcactgcgcctggctggaagtgttttttatcatcaattttttctctccagtctctagagcatgatttcctcaatctcagtattattggcactttgaactgggtaattctttgttgtaggacctgtcctgtgcattgtaggatgttcagcagcttccctgggctttgcccactagatgccagtaacacctccaasmtgtgacaaccaaaatgtctccagacatgtcagaggttccccggggggcacagttatccctggttgagaatcactgctccatatctgaatgggggtgttgtaggataccctttggagatgtgtcatcagtttttaaagtttatatatattatatgatattttacatatattaatgcttgtgtgtatatcatgcatattatagcataacatatatattacatattgcatatttttatatctatctctctctatatataacatgcaaagccctcaagaacatgcctgactcagagaaatgtctgatcaatgccarctgttgttactatggaagcatttgttggcagtatggtgtagactatagattaacttgtcatgtgtgaggtatatgagccataacaaaaccaagtctatgttgaagaaagatggtgtacacatggaaatctgcaagaatgtggcctcatgaaagagcatgcattcagggcagttaacagctctattcacataatacagacctgcagccaagcaaatggcacatttaatgtgcatggcacacttaatacagtggtctgtttaatgttttgagcctttcagttccttcaagtgggtttcccagaatccccttaattcagaggctgaaaaccacctctagatatggcataaaagtattcttcagttggaacaaagtcccacctagaaaaacatacagaagatctacatatatatacatgtgtatgtttgtatatgttatctctggkagtagggtgatgcgtgatttgcatccttccatcattttttctgattttttgatttaaaataagcacttatgactttttttttgagatggagtctctcgctcttgttgcccaggctggagtgcagtggcacgatctcggctcactgcaacctcccccttcctgggttcaagcaattctcctgcctcagcctcctgagtagctgggattacaggcacccgccaccackcccggctaatttttttatttttagtagagatggggattcaccatgttggccaggctgttctcaaactcctgatctcctgatctacccaccttggcctcccaaagtgctaggattacaggcatgagctaccgcatccagccacacttatgacttttataaagagaacaatctcatgttggcctcaaagcaagcaatgtctgaaagtgtctttgagagaagcatgattaggtagatgcakggagtatatagacatttctktctgtgcttctgctgcctcttcccttcccctcgttgctcgtcgtgccatattctggccaggtcttaactgcctcaaaaggggcctattcttctcaccaaattttgggcttagcaaaatcttcaggtcacctagtctagcccctgatgggaaggctgaattctgtttatcytatttatctacattacttgtcacactacaggcactgaggaaatggtacaaacttactagaagttcaggaaattgtacttcatcttggttttaaggagtaattaatctcctaccatttggttccataaacgtgggtgtgacagaggaggggaggaagagcagctgtgagcctgcaagtccctgtagaaatccttttccctctgattcttattctcagatcttcttacctagggaattttttttttcctttcctgtcccagggatctttctttcatcaaggtgataaacgtgggccagcgatttttagtcaacagagtccaggactacatccagagcaagatagtctactacctcatgaatatccacgtccagcctcgcaccatttacctttgccggcatggagaaagcgagttcaatctcttggggaagattgggggtgactctggcctctcggtgcggggaaagcaggtgagtaattattcagcacactggattttctaggcttagagttagaagggcatgactgaggtcatatattttatctccttacttaaatcccatttggacgtaggctgtggtttcatagtcaggcaagtgctcaaggtgtgttcttgctcactgcrtctagctctgtgttaaagagtagataactttgacccatttctgctgtgatcattcaaccatcagatattcattgrgcacaacttgtgtacttagcaatgtacagggtgctccagttaaagttcatttccttttgggtttatattaactatgtagcaccttatggattttgaccatggttatgcacgttgtcccttacagaccaagttagcaggctttgtgtatgtgtgtgttgagtgtgtgtgtgtgtgtgtgtgtctgtgtgttttctttttacccttamttttcatttttaaaccccagtttgcccaagctctaaggaaatttctggaggaacaggaaataacagacctcaaagtgtggacaagccagttgaagaggaccatacagactgctgaatctctcggggtgccctatgagcagtggaagattctgaatgagattgatgctgtgagtaggaagctctgaaggcccagaaaagccaacaagagttcaggcaggaactctcagaagtcactatttagacagttttatctaggaaactacaaccaacaagtaaaaactctgaggaagctgactctatggccagcccgggggatcagggaggacaattgtacccctaatcaggggtttcctgcctgattcagtacctgtgccaatcatgggacccaaaccaatttttgagccagcctttctggcacctggggaaagtagggctaacaaggactcattttgttcctttgtatatttgcctcctgggaaaaataaatagctaacaacccacttctttgctttctgcttagatcatttggtcagctattcaggaaaagtttttcccaaaatttctcttggctttctctcttcttgagtacaaaagtagacatttctttctttttttttttttgtgacacggagtctcgctctgtggcccaggctggagtgcagtggcgtgatcctggctcactgcaacctctgcctcctgggttcaagcaattctctccctcagcctcccgagtagctgggattataggcacctgccaccacgcctggctaatttttgtagttttaggggagatggggtttcaccatcttggccaggctggtcttgaactcctgaccttgtgatccacccrccttggccacccaaagtgttgggattacaggcatgagccaccgtgcccggccgacatttctttttctttccttccttctacccttttatttttcatgcaaggtctccagtcccttcagtttccctccttctctgcttcctgttccttttagcctcttgactttcttgacctgtaagttccccccagtagtaggagaatgtggtagcttgagctagagaagttgcctctttccggcagtggtcctcacccggtgagtcacagacactctgtgacactctggtcacaggcagctgcaatacatgaaaggacccagcacagtgcctggcacgtactaagaaactagcattcttcaatgtcatcttccttatttgggatggggctggtgtggtacagtctatctcttcaagccagcttcaagtggctttttgcagggtgtgtgtgaagagatgacctatgcagagattgagaaacggtacccagaagagtttgcacttcgagatcaagagaagtatctgtatcgatatcctggtggggaggtaagacgcccctgtcatgtaaagtgactgcctagacccttgctgagtgtttaactttaatttgggggaaggattgaatgtgatttggagggtctaggcatcatttatcttccttcccttgggtcattttggtttcattcagcttagacaatcgaatgcctcattaattgttaagattcccagggataagggtgacaaggcatcctctgttcagtatgttttagaatcaacacaatcatttttacttctttttttccttgtrctctctsaatcccacccccacataagtaagtggagtcaccaagtaaatatatgggataggaattatttccctgtcatcttgagtgttttaggctatttccttgtctaagtggcttccatactctagggatgtgtgaggcaaaagtaaataaaactgaatggcagaggtacaggaaacccctaggagtctcttgtctcactgcctgtattaatctgtgggaagaaaaaacacaacacacacaggttgaactcacacttcctcttcttaacctgtagttttcttggtctaaatattgcttttgaaagatctgagttttctcaagagataccagggctgggggcagttagcaggtgatgtaaactcactgagcctccaggaggaaagccagctgaggaagaagaagtggcccttagtctccaaggtccagccactgacttggctgccagcttgcacctgggctcctgccagcctgccccatttccctccacagtcataccaggacctggtgcagcggctggagcctgtcatcatggagctggaacgtcagggcaatgtcctcgtcatctcccaccaggctgtcatgcgctgcctcctggcctacttcttggataagggcgcaggtgcctttgagggaggggctgggagacacatccagtgggagagggctggacttgcagtggcaccaggattcctgggaaacagacctccctgtctccrctcaaattagagtactttctccagacagcagtgtggggctcccagcagccactgagtcaatgacttgctgagttcactctgctgctacgaaagcttccaatggagagtggctgctgctggtgctccttgatcctgcctggctcaagggccagtgtcatgctgacactcctggcagcatcaggacagtggttgaatattcccagcctgccacgctgcctactaggagggtggtatcttaggagcagcagttgtttctgggtaagggcagtaagaaggtgccgttgccttcttccatacttcgcttcccgatcttcgggagctcctgggaagcctgcattgtggatgctgagctcagcatcctgagctgctkggaagctgttgtggtcagaccttattggcctttgctgtacccaggtgacccccttccattgggctctctggctacaatacttcctgttttwgcctgcgtggaaggatctaagatggccttatttccttccttagccactcagaaggttgggtggctttgtggtctggggtttaagggaggagttgtacaactctaagaggtggtcaaagtaagggaaactcattatgagctctgtagattctttcttccactaacttgaccttactccataatactaagagacttccctcgcctggtctttctgttttcagatgagctaccatacttgagatgccctctccataccatcttcaaacttactcctgtggcctatggtaactatgcacataggggctggcaggagctgggaattgaggaaggtcagaattttctctgaagtttgtctagagttcagcttcattatccctatataccagggaagctccatcagtgccttctgttttgaaagggatgtatgcatgactgtgtgtattgcagaatgcgtacattcctttgtggtatactttcccataactaaggaattttccattgaacctttttctttaagtcctctctttcctctgttttctcagggtgcaaagtggaaacaattaaacttaacgtggaggctgtgaacacgcaccgtgacaagccaactgtaagtattttcccacgatgaacacaccagtttccctgccaccttgagtctctgaagctttgacatcaagagactggggtttcttttatgtacaaaagggaaacagattcagaacttacgtccaaacgtagtttgctacgtctgaaactgatgttggaattattttttttttaaattagtacccctttcatgagtcttaaccttgaatgttggctcctggaaatccaattaaatatggaaagtgtttggctgaagtgaaatgcaaattactacccccctccaaccccaagtgtccctttagaaagcagagtccagaggagcctataaggtgggggtcaagaggtgtaggtttgttcctaggtctgtcactggtaatctgtgtggtcttcaataagccccttcctttctttgggtctttttcctgctttggaatgttatgctcaaggagcttctcccttttagccccctgatgctaggaggccaggccatgggccatgccctgtgagggaccctgtgtgcagaggagcaggagtgagggaagctgttgtggttacaagcgcattattaacctgtatgagtgagcttttggcttggctttcatttgtgtggtgtcactccatttccaatcagaacaacttccccaagaaccaaacccctgtaaggatgagaaggaacagctttacgcctctgtccagttcgaatacaataaggcgtccaagaaattacagtgttgggagccggcccctcaagcccctcagccctctccgtgcccaggacatgcaagaaggggccgactagccgaagacccaagtcagcattccggtggtgtaactgtgtgtttccctccagccctggcctcctgcccttgtcactaatcaccaaggagtcattaacttcctccctctatgcccacccctgacacttcaccattwatcttaacacagaacatgaggttatgtgtttataggacaacttaagctgttcttcagtttgaaacatcttttcacccaggggcaagttagcaaattgagtcttttaggacagattctcagatgggatgatctggaggaggaggaaaaagatacrctcccttggggctgagcatgccccacactcttggatcttctctctgttccctggtgtcttcactaatgtcctcatgttggtgaagtgttgggggatggagggcgggtgagcagtcgggggacaaaaagtctatttttccttcacttttgtctcttcaatgtgtgttttcctcacactccttacttgactgctttcttcccccactttcatgtcccctctggattgtccagtgtaatgcatggcattgtggtgtctgtctaggaaggaaggggtgattgacaagagacaagtctggcccagttaatgctttctgcagtgggtctaaatggatctggactggaggagtctttcctttcctttctcccttcctctccagccaggtcctgtaagggccagcccagactacaggacatccacagaatattctggagcttgcaagtagacatagggtgagagttcttgcctcctttcatgagaaacagttctaagtcttcgatgccctgggagaatctggctctgagcatgtgggaaatgtcttggtttttatttttaatttagagtcaggcctgggtcttttgaggtctgcagagtggggtttaggagagtagggtgggctctagctcttgcagggctcttagagagcagtcatgtcttttctcccatgactctcaggttctttgccaatcacagcaacttttcctgccaaagccagtatcctctggggctgtttagaagggcagttagattcaggagtcaccactgatgtttgagttgctcaaggcaagaggcagagaagagttcactaaaactgcttatttttgaataatttcagcacactgtccttaagaagaaagaaacatcaaaacaaaatagtttttacatgaccatttttttcccaaatgtggaaaagcttgatgatgaatttaatctctctcattggagtattcttttgttcataaagagaaactatctcatcttgatgtccagagaagtccttggaaccctgtgggatctagctcgtaactgtttgtatttctctattcacttctgtcatttcattttctttgtagggttaaacagaaaatgtttagggaagaaattcttagccccttgatgaccatgatggcttattctctttcccaattttgcatgcaaaatgtacgaatatatgtatgtttttctgagaggcaagtttagggttctcatgggattttaaaaagagataggtgactccccaccttaaagttatctgctggtcttttagaggtaaccagtgagaaggagttagctattttccaagggtgttttcatttggtaatggaagactttttgctgtggttctcatccaggagtattccttagaattgcctttargaktgttgaatcataaacatgcctgtgtccaccttatgcttaatactgactcagaatctctgggatctgggtctggacatgcatgtatttaagtagcttcccggatgattctgattcatagctcgggttaagaactccaccttargaagttaggtggaaaaatactggatagtagtttctcagacaaaagtgtcagcctaggaattctgaattcctcatagtcctgaaaggacagttctttgggtttgatgtttgagcagatcataatgttaaatgatataaccccctggaaggcaggctgctgtgttttagagggttattctaggttctagtcccatctttaaccctttacattgctgagtgatgtggaacaaatcactgaattaaataattgtctctagagagcagctggggattttaagcaccctggagagaggtgcagaccctgccaggatgataaaggttgtcatcactggcaactgactcctgaccccgggtcctttactcgtatgtcccaagtaggataccataggcagcttctaaaggctgcttacctagattcttctcaaaattgtgtccaagatgttaagtaacctgctattcctgtttagtggttacataacatgtacttagtgtctttgtggagctttgggctggtaggggcagggataggggaaagctaaacagaagtagaagaaaaggtccttgtccagaggaaggttattttaagagacaggacatgtaatttataacaaatggacatttgcaatatagcaacagtctgagtctagaagtgttcaaccatcacatcgcttctcctgacttttctgttgtcctatggctatgagactacaggggttgggggatggggatgcccccaccaccaccagtgtgagaatgagatatggttggggaggcgtgtttggcacttttacaaggttgcattgtccacatttgcttggatggtggcatctgtagcccaaatgggcattcagtcttttcttctgctgtgaggtaagagtaattcagacctaatgaatgagaagagggagcactttgatccacagactttggattaacactgtacccactcttagcaaaaggggacttctctaacaagctagcattgtgttaacctgtcattaacccagcattagagacaggtcactgggatgttcattctggctctcagcctgctgttatttccccactctcacctgtgctagttcgctttctccagaagaggagctgaggtggtcttatcctcagataggacatgagaaattggaatttggcaagcaagggcttcagcatcctttagtttctaaagcaagatcccttcagagaagtctagcaggaagaagccaggagaatgtagaatggaaaagagctcttactccaaattttagagaagtttcagctctacttctcatcttttctctcctggtcttacttgaatgcatgttggtaatctgtatacattactatgactgtgtctatcacaagtcctacaaaataaaaatggacttaaaagtactctctgctgaggctgtaagttttgttttgtgagaaataggtaaagacattagcatttaatctactggaataagctggttgctgtggcttatacctgtagtcccagatacttgggaggctgaggcaggagaatcacttgagaccagcctgggcaatatagtgagacctcacctctaaaaaagttttttataaatttacttgtctaaagtggggaaagggaaattattctgttttcttattcttgcttcaagactatgacagatttgaaagagaattctaaagcagatttagagaacctgcttctcttcttatctcctaatccctaaattgtaatttagctcttatctgtattgttgttttgttttggtaaagggatgatttttacattgagttttaaagtagaataagaaaagcttctaaaaacttgcattgtgctagggatctgccctatatctttgcctctggtgtttcgttgttgttgttattgtttgtttgtttccaaagaagttggagttaaggacacaatatatttgtacccctagactgaatgggtgagtattccatatgaggatctgggtaatcctctttgcaacccacatttggtcttcagagacactggcattttgaagaaacatatgatatagctgtttggaaataaattcatctatgttactttttttttcttttttttttttttttatgagcaggagatcttaattgacagaaactcattggtggttggagtggccaatgggcacgggaaaaagtatccagtaatcagaagaattgtatctgggttatgtaatcttatgcacattccattgtctttgccaagcccagaagccatgttgtgttcattgttaagaaatttgatagatttacccagcttttctatgtattttgacttattgaaaatatgtaacaactgagtcgggttgcarcactggtggggtagaatcgactttccctgaaggtgacacagatgtcagaattgtgtccagggatttaatttagacccatactgtccaggagactgtctctagttggatctctgtgctgactgactgacagacagactttagtgtctgtgtgctgactgacagacagactttagtgtctgtgtgctgactgacagactctagtagtgtctatatgttgaccaactggtagaccaggaggatctgtgtgctgattgactctagtaggatctgtttgtcactgacagactgtagtagtgtctgtgtgctgactgatagatagactatagtaaaatttgggtgttgcctgactaacggtctagggtctgtaagctgacagtctgcctgctttctgattgtatccattgaagtgtatgtacattatggtaattctctgtctattaaatgtgtctaacaaaggaaggaattaagcactccacrtgttttctttataggggagttctgtacactatgattttaaatagatatttcttatatagtagtggccaaattctcattattttgtacaagataaaggttatgcatcacttttatggtattttgtgaactcagctaagggaatgcctgttcagagcytggagttgttacctttacttgaagtcatctcatccagtcccctgctttagggcaggacttcagttccactgttcatttctgaagcttctgtgtccccagcttaccctgttctgraatgttgtattccattggacagggctgctatttttagtcagccatgcatttggattttacrcttaatctagtaagtaaaaatgagaagaaaatttggcatttaaaaattgattttaagggttggcaaaagtattttttccagtaagcctttcactggatatctgtgaccaatgtttacctacgcaatgtttttgtatctgaattgcttatgtacgttttttattatattgacctaacaagaagatcaacttatgctggtatggtgatggttttgctatggcaaaatcaaagggctgatcatacatggtgccctttgggaagggggatggtgtggggctgagcacctctgggttgaatgggaatgggtcagattgggaagcctaggaagagagttctactgtagatttcctaggcactgctctgttgaaataggaacataagtctttagcaacattctgatttaatcgggtgacactgataacaaagtatgccactcagatccatttaaagtgtgcataactgtatttgaaatgtgtttttgtgtgcgtgtgtgtagaatgggtaaataaaattgttgagtaacttgaacctatcagaaggcttctggrttttttgtttagtattttcagttgtgtttcccatcccttccccacccctaaaactttgcctcatgctgcacaaggattcagactcagacaagccaacagaagttcgcactgtaattgaagaccatggtgtagccgtggctctcttctgccaccttctggggaagataggaagaacattatggaaagcacatgaacttcaatagttgtgtgttcctgttggcacttatgcaagaattaagaaacaattacatttcactgcactgtgcagtaattcccattagcaacatgtaactcatattatgtattataaagaaaacttttggagattttttagcacttrgtggactgttgttcctaaaatgtgatttgcccatttctaaagagattatggtcaagggtataaaacagcatttaattttttttgagacaggaaatacagatgggattgttttaccattcgcatgccttattccttgttaccttaacaaagaccagaagctcattagaaatgcagaatcccaggccccatcccagacctccggagtcagaatcctcattttactaggacgaccaggtgattcatatgcacatttaacatttgagaagcactgttctaggggaaaaatttcccacaaggtaaaatgttagatgccagttaatgggaagaagttgatctgctctgatgactggtttcagaatggactcgtataactaaaatagtagggaccctcctcagaagccaagtagcccctgactacagtgtcactttattggcatggtcttttggctgacatagcctacacgatttccttctaccagagggatcctgactgctcctgcttcatatcttgggtatgtagcttatggtccaggtctgaaaggagtgcctggtccaatatggtcacgaggtcagctcctcagggaaagaagaccatgactacgccattcgggtagtcaaggtgtgtgtgtaggcacaccagtgtgttcatgcatgtgtatggatgtggggatggggaggttgagggaggagggaaggtaggggaaggattctgttctacttttatgttcgctgcttggcagtgctgtaatagctttgtgtctcttcctctctggctcgtaggcagcagagaccacactggctgtgcgcagacgcccctccgcagcgtccctcatgttgccttgctaatgatgtggatgttcaggcctcacctctccaaacgactgggatctactgaaaagcttgggatgtcagcttcacagaggctagaacaggaagttaagtgggaactggactttgggggccaccaaaacgaggcctggagaaacgtcaccatatttcctcccctcctgcctaatgggaatatcagttacactgaaaaatttaacttccctgtgcctcaaaacatttagcaacctgaaccagtgactttttgtcatctctgtgctgagtttggtccaagttggtcaatctcattctgtataggcatttaacatcctacctgtgactgtctgcatcctttgctggctcttttttgcccaaagtgcaaatgcacttcttcagatttacttttcaagtgagaaggtaagagctggtctctgccactgttccaggcgagcaggctagagtctaatatacttatgctagcagttaccatttgccacattggaagcaagagacaaatcaccaggtgaatggagggtcttctgagaaattcagtccctaaaacatcttctctgccttgatagaagaacagtgtcagtggcaaccttttcatttagagaagtttttcttgttccaggcccttcaggacaggatctgactgcaagactccccaaaatgggtacccatcttytaagttcccttttgtagctactgtacttttgacttgatgcatgtgcctctcatgcatcaagatggggctgatgtggttctcctgggtggttgggaatgtggactagacagaaaagtagagtgccatttatatcgcgtgagtaagtcaagaaagctccttgagaatcagcccgatcagggagtgttttggcttcagaacaggtggaaggagacacgcccctctgtgggctctgtcaccatgatacagtccttgagagagctgtggctgtgacttggagggcagtagtctcctgatacctgcctcttggccactggtcactattgtggtcactgatctctcatataaaagtgagggtggcggggtcatggaccagcgcctcagtgcattagtcattcgcttttccttacagacaaatcagataactcttccccagtgattgtcaaatgtatgaatgtatctctgtaaatgtggttttgacatgtcactgttactgaaggagagtatggaatccccacaggatattatatcttgcaaggaaagtctatttttttaaagaatagtatgtttttagctttacttttctttcttttccttttcactcaaatgctcacttgctgggcaaaagggtgagtagcaagaaaagtaatgatatgtagcttttctcaaatggttcttttatactgtggatgatacaggactctgttacctaagatgtgataagctgggctgcaggcggttcagcatccagcaactaggagctgcttttctacgtacaaagctgccttcaggaaggctccttaccctgtagcagatgattttcatctggctgcctaccgcatgctgtactataatgatttagttgtgatatggatttctctctgcatcgaaaactgtcttttgatgatcagacaatgtttatatttagttatttattctatccatgtaaggcatttttgagttttcttgtcactgtttgcatgtatttaatcagaatgtaatataatttatgttgtcaggttttttttgtttgtttgtttggggttttttttgtagaaatttaggtagttagagcttttaagtctaatgtcatattaacttaagttaaatttccagaacgtagatatctgtcttctgtaaaaggaaaataacgatgttaagggacagtgaattttttttgaatactttgtttctcattgatttttattgtaagtgtaaaccaagagatgcatttctctggagaagtgtttatctcctggattaataaaatcatgctaaaatatgcgagtaatatgtattgcttttgtaataagaacataaaataaaattatttttaattaaaaatgcaattaatttttaagataacacacgaaaagataacatttggtacattatatgtatgcaaaatattaataacattgtctaaaatgtgtttgaaactagcttctttaagatgattttcaaattattagattatatgtatatttccaactagtgattttaaccagttcaagtttcatcagcatttcaaaatgatatcagtaagattgtgactaccatgcattactgacgtcctagagtttcatttatttatttaacaaatatttagtgactacccattagttgccaggcaatgactaaaacaaagtccctgacctttgtttagagtttattattggaaaggaaaggttaacagcaggtttgtaacctaacgcatctctttctactggggatgctttccccctcatgaatgaccttcaccaaataatgttggataatggttacataatgtatatgataaagtaacttggaacaatcttttggggtcagcagcaatagagataaaatgaaacattcataataacaacagaggatttccaaattctttaagttcaagggttcttctgatagaatgaaaatgacttatgaattctccaatttgaaaacaggtgagagacagtggttatgtgtactgatgaatacattgagctttaataatctagctggtgggctgacagtaatgaggatgtggtgtcaaggtttaatttccttggaaatatctccaggcacttctgcaagtgttctctaattcagccatcaagtcatcatttgtaaaaggctggggtgtctggaatcattctctgggttttacagagaggtaaatgagcaccattactgagtcacacacctcaacactcgtgatttttataaagccaataatatctcagaacaaggtaaatgttaagacccaacagacacatgccacactgttttaaaatgttgctggtaacttagcaaagataccagcattagaaaatgattactcagcgagtacttcagtgttgggtgatggtcattatttgcctttctcctgtaggtttcatcattacaccatttcttaaacttctccagggtcttcacttaggactcactgtgaggagcatcaaccttcaggttcactagcttgccctggctatttatttttcatttttgtagaaatagggtctcactatgttgcccaagctggttttgaactcggcaggaggtgatgagcccatgggcacttcctgtggcgtctgacaatggcccatcaccaaggtttatggtctctagaagtattttgcaccatccaaccttcattcattctcttgaactcatttgagaatttgacatgctaaggactctctacccagaaaaaggttgacacataggttttgcatacagtttagggaggtcatgacctgaaacccattcttggacctcagggtaggaaacaggagctacgtaatactgtccatactctcttgtccatttctctcctttaacatgtaaaagaaaaaataatccagtgacatgcatttgatactatttaagyggaggaggggaatatatgatgtactggaatttttttactgcacactgggatatttaagaacgtggtttttaatgagatagcatcactgtaatcatggagagtaatattttctttctcttaaaaacatcaaagcacagtctttcttcttttattctcatcaagccaatgtcagctgcattccttcagccctttacaagcagaacaactacgcttctgaattcccaaaggcatttaaatgcctttttgattgtatgcaacactctacctgtgaaaatcagattagattctataggagagtttccctgcaattaagcaaaataatttcagaagcataggaacgcttgggaagcagcactgtagcatggggtctactctcaacatgtttaatgcccttcaccaaacatccagcctactttcagagaataacttgtttatccatttgggtttccttcatcactgatatgtttgcctcttcattgccattcagttttcacttcctaggttctctcctctttcccccattgtctttgtagaatttatggatgggaagggaaactgtgtcagagtatgctttaataaagtctgttaaatattcttttctgaatttaaattcctgagtcatttcactcaaactctgtttcagattagagttggtttcagctgtggatttcagtaaatctaaaataacaactccaaggtcacattggttcaggctggtaatctcagctctttgggaggctgaagcgggaggattgcctgaggctaggagttcaaaaccagcttgggcaatatagtgagaccccccccccacccatctctacaaaaataaaaaataaatcagacaggaatggtggtgcacacttgtagtcctacctactcgggaggctgaagtgggagaattgattgagcctgggagtttgatgctgcagcgagctatgatcatgctactgaactccagcctggatgacagagtgagactcgctctctctctctttctctgtctctctcgctcaaaaagaacaatgtgttggattctacttcatagaggaaggtggctactccagttgcagaaaacatgtttacactctggccagcaggaaggaagaaggcaacaggacataccagcttcttttaaggatatttcccttctcatgtaacccataaatatatacacctactgtaaagttaaaaattaaaaaaagaatatttcctagattttgcaagcacacttatgcttatacctcattggtcaaaatgtagtcaagtggctacatacagctttcatgcaggctggaatatttttattccaagtggctttgtgccagttataattagggtttagttaccaaagaagggttcaatagctattgaagaagtagcaacctgccttagtaggtaattgaaacattgtagcaggtctgaagagctataacaaggtgagcagtagcctttgaggagttaggctgccattgctttgtaagagaggaaaaaattatttttccttctaccctcctaggttctctgcctgggactttgtaaattagactaacaaaacagattgacaaaagaaacccaaacaatttattaatgtgtgaagcacaccccacctgggaggaacctcatgatgagtaactcaaaggggagttagagcttagatttatatagcatcttaacaaaagagcaataactttgtagagaagtgacaagacaaaggaaaaaacgttaagtttctagggctgcaaattttgagaaggcaaatacctgaaagaaactaatggagaaggtttgtgtaggtctgtcttgacactgacttctttgtggacataaatctccctccggagaaaggacttacagcagtcctcattcctcagaagtttctgcttagagtcatctaagagatactccaggaaggcttctttctgcttccattgcatctcatttgcctgcagttcaaaataatctttatgccaaagaggcatattttaaggtgacttattcttgtcccctaaaacttagagtaacaatgcatcaactctgatcttgccacagtgcaggtccatctaaactcataattaaagcttattctacagtgtttcatgcacaatttgatttttacaaattctttttaaaatttacattcccatggaatctgcctaaggctactttttgcaaagcttatagcttgcagtgaacgccaagaatgagttctcagaaaattccagctgagcgggggagggagcagctcttctgaggagagtccgccccaatatctgcccaccatgtattcattgaaagggcttgttacaccacaaacatccaccagatggctttttgaggtcgggttgtgagacacctgtggccttgtcaaagcactcaaaccgcattctcaggaggctgttttcagcgttccttatcacacactccactccttgtcctgttttcagggtcaaggaattatattctcatgcacaaataacatacacacagtgcctcagcatttttccatgccccaacctcaaatgccttgtacataagtttgagtatgtggctgtgcgccccccacacttttctggcccaggttgttttggtcaggcattggggaaacatcaacccaacgtgtaaaaaacattaaaagagcaatttaaatcttttctgaattctcttgacaaagaccaaagggaatccattcatgacaccctgtagaacttcttaaaatagtctttcctgaattctcttaaaatcttacacacactgcaatgtgtgtgccccttttataacttcccacaactcttcccccagattgggcattgctgacttttatatttctactcttccttcctcacctcctgatctcttcctttaactaccatctgcccatttctttgtgttttgttgttatttgtttttttgaaacaggttcttgctttgttgcctacactggagtgcagtggtgcaattacagctcactgaagccttgatctcctggactcaggtgatcctcctgtctcagcctcccaagtatctaggactacaggcacatgccaccatgcctgtctaatatatataaaattttattttttatagagatgaggtcttgctatgctggtcttgaactcctgtgctcaagccatccacctgcctcggcctccc

SEQ ID NO: 93655 - DNA, 19864 bp, Homo sapiens
  misc_feature (1)...(19864): n = A,T,C or G
accagcctgggcaacatagtgagacccccccccatctctacaaaaaataaaaaaatcttcccgttgctgtatgtggagcccctctagattgtcagtgatagaaaccacttcaaactggctcagccctaaaatagcgatgattttgtggctcacgtaactgaggattccaatgggcacagctggttgcaggccccgctggacccagctctctgctggccccaggccacttgctggcagcttcccacccactgtcagagcctgtccccccggtggtggtctcacaccatcttcacccctcaactccaggggtgacgcttcctggcccacctgggctcctgcgccttccctgaaccaccctcggtgaccagggtgggtgaccagacctggaggtggggttgccctgctggagccctgtgggaggaggggagaaggtggctcccgtgctgggtgggcagggggcgcgtcttgtggagtccagctctgtcctggcatcggtccctgccccacacagccttaaaattccttcccaccctcaaagcccagcttgggtgtcctcgggggcctttctcccgccttccatggggcttcctgctctgccgcaggtaccttttgttgcccttgtcgcaggccgcaagctctgcaggccgtgaacagagagtgtccgagagtggaastagcggaggtgggggacagacggctgggccggtgaatgctggcctcaaaggctgatggcccagaagccctgtcatctggaaatccccatttgccgtggggtgtgggacgttcctggggcggtgagctgtcagggagcacagcgcaggcagctctgaggaccctccctgaatccgcatgcctgcagcctacaccctggcccgtgtctacggcgtggagagtgacctctcagaagtggctcgccggggctcaggcagcgcctgccggagcctgtatgggggctttgtggagtggcagatgggagagcaggccgacgggaaggacagcatcgctcggcaagtggcccccgagtcacactggcctgaactccgcgtgctcatccttgtggtgagtggggtggggcgggtggagcagcagcccggtggcctctgtccctagtcagggctgctgccgggagcaggagcgaaggcgtccatccaggctttgcttggctcctggggtcagcgggggctgaaggaacagaagcgtggttgagtgctcaggaaccgctcccatgcggcgggcgccaccacccgctgggatctggaagttgcccctgcgtcacccctgctgtggccgggaggcctctgtggtcaggcaggtggcactgactcccacccccgctgcctgcattggctgagggagggccgagtgtttgaggctgaggtccttggggctggccccctgcagggtgtggcccaggctgtctctccctcgtgcaggtgagcgctgagaagaagctgacaggcagtaccgtgggcatgcgggccagtgtggagaccagccccctgcttcgggtaaggccaggagcgggtggtcccggggccctgggagtcacgcttgtgcccggctctgccctcagcctctgtctgggcccgagtgttctcacacctgcggcagccccgccaagaccacgtgcaggagccaaatgcagagatggggctcgagccgggcctccaaccccggagtctctcctcgaaccctctgctgtcgagacccccagcggctccatgggaaacaccctgtgccttgcagttccgggccgagtccgtggtgcccgcgcgcatggcggagatggcccgctgcatccgggagcgagacttccccagcttcgcccagctgaccatgaaggacagcaaccagttccacgccacctgcctcgacaccttcccgcccatctcttacctcmatgccatctcctggcgcatcatccacctggtgcaccgcttcaacgcccaccacggggacaccaaggtgacgcgggccgggagggcagaggctgcgctcgcgctgtagcgcgtgtctaggcttgtgctgccgtggagacggccccggggctcgcgtgcagggcaatctgtgtctgaaagctccaccctgctgtgtgcgaagctcactgaccatctgggttcttctgtttcattttgtttcttgacttgcccgggtcacggccccaccaccttcttcctgggttcacaggcagacgtgtcaagtaccaggcacttggggtcacagctccactccagtgtggccctgagggcctagactgagctcttggagagcccaaggccgcctggcagaccagagggttggggagacaagggtcaggcaccacgtgaatagccagggtgactgctgtgggttccaggtggcgtacacctttgacgcgggccccaatgccgtgatcttcaccctggacgacactgtggctgagtttgtggctgctgtgtkgcacggctttcccccaggctcraatggagacacgtgagtgtggaccccgcccctcctcctttttgggagatggtgccaggaactctggtcggaagagacggaggcacctgaaggctgtggygctgagacagggagtcccagggcaggcagcagtcccccgagtgtgggagccacgggcagggtgtccccatagagccatcccacagcccacgtccacagggaagaaagagaggccgctcacgcgtgtgtgagcaacgcccagggtctcccacctcctgagtgacagcgtcccctgcagctcgggaccccgcaggctcttattctatagaacagtggcttaggaaacacgcctgcactcccagatgtgtgcgtaagtgtccgacattttgaaggaaaggagtcaaagcccctgatttccttcttactgaagcgagttagagccagtcaaggcggccgggtgttgaccccgccccggcagttgggtgtcttttcttgggtggggtccggcagctgcatcttggygccacagagcccccatgtacgccctcctcggtgcacagcttggccctgaaccgcctcttcccctgcgctgctctgtgggggtgccacagagcccccatgtacgccctcctcggtgcacagcttggcccagcctccttacgccccggggctgttgatttcttccctcccgtgttttcatggtgtcttattctcaatgtgagaggcgcctcccatttaagggtgtctggaagcgtgtggggatgtgcgtctgtcccgggtgggagcaataacaccttctaatggtcaggggcctgccctgtggggtggactcagacccacaccccaggactgcccgcctgggaagcaccaggctcgtggctgctgctccgggtggggcttgcaggcttccgctgttctgcagaacacggtgacgaacgcaccagcttgaattgggcgcttccctgagctgttaccccatggggcttggcagcacccttggccagatgtgggtccagcctgggcatagctgtttaccacataacctaaaatttcctgtctcagccattcgagagcatataatcctgcggtgttgaggacattcacagggtcatgtgagcaccacctcaagccacctccttaactttttcatcacccctaaaagaaacctgtccccacagcagccacctgcygtctccccctccctgagccctgacggccaggaatgcacttcccatctctggacttgcctgttgtagactgttgtagacgcttagagaaacggatgcattcaccgtgcccctgccctgcttttccaggtttctgaaggggctgcaggtgaggccggcccctctctcagctgagcttcaggctgcgctggccatggagccgacccccggtggggtcaaatacatcattgtcactcaggtgaggcctggggctcacccagtaccccggggtttcctttcctgccaggggggcccgcccagcccccagggcccttaaaggcwaagcgcggctccctgtccctaccgtgtctcaggcaggaagccagaacgcctttgtccattcatttgctctcaaagtggacattacaggccactggtgatgctcagagcagcagggctgcgctgagggtgggagggtgagtctgacacaggctcccagggagacaggtggggagtatcagacccttgaatagggagcgcctgggtnnnnnnnnnnnnnnnnnnnnccccaaccaccccagcagaccggggttcctgccctctgacctgctccgagggccaagcttgcatccagtgatcacggccgcccaagccattgccgccaccttcctctcaggggctgcctgttcccaggctctgtggttctctgtcccccctgtgacagaagcagtgcccagggcagggggctcgcagctggcaggggcggctgtgcctgcaggagctgcgtgtgggtgtcaccactcaggcgctttaccttctgaccaggacccacaggaagggcgggggcacaccgctaccctcctgtgtccggccctacagatgctgggcacaggatgaggcgctgccattcctggtgacctgacatggatttctatccccaggtggggccrgggcctcaaatcctggatgacccctgcgcccacctcctgggtcctgacggcctgccgaagccagctgcctgactgcctcagcagggaccgcatgccgcttggagaaggggtggcctcgccggagctagggagcggatgtggtgggctggccggactcctgggacatgtgggtggtggcttgaccccgggcccatgggcagcttgctgtggggcagtgcagggagtcctgcggccgcccaggtgtcaggagaggtccccgccgagtgcttcagctgccctaagctgcaccagcgctttgccaagatgggatggggagggggtatgagaactggcagagcctcggtgcagcagggctgaagggctttctcaccccagctctggctatgcccagttctctgagaaaggagctcagtggggaggtggtccctccagcggaccagggaaggggtcaccgtgctgggagcagcctccttgggcctcaggaaaccaccaagtgcctcggatggtggctgcccacggcgcttctgctgagaccctgcccccggcccaggtgtctcggagggtggctgcccacggcctgggtgtggctggaatggtggcaggagtgggcaccagtgcggccccggtggccatggggaataaaccagcattgctgcctccggcctccgccgtttttctgtttcgtaaaccagcatcccggggttcctgctctgagtgaccctggcacctstcagggagtccaggtgtgccccatgagggcctgggggaggggcaggctgggcagagccacagaggggctcccctcaaaccccacattggctcaggtgggaccctcaggagcaaccccaggtctaaagtcttcccatgggcgctgggctcaccacccccacgccagcccctgcctcccgtacccaggccggacgtgacggggccgtccctgcattctgtgctttcccagttgtacacatcctgtcccctccctcgagtctcagtcacagttcagtgacctggtgacgggaggccccctgcagtgtctgacccaggccacgcctgtgccagcccagagccagggggaggaaatgggggctgggcctctggtccccatggggaggccacccttgtccttggtagcatcagggtgcagaggtgttcccgggctgtaggggtgactcccccaccccccaaggctctggagaggccgatttgctcaggaagccgaccttcacaccttgtcctgctattaatagacgcctggttgacacgggaccctcggttgggtccggagcattgggcaggggcacttgtcagtgtttgagagctgaagtttgggaagccctggggaagcgcaggaactccccgcctgggctggggctgccgggcagggcccctcctatgcctcggcgtggctagagagggcgggggcagaaggctccgggacagccctgcaccctacagatgcgggtctccgcccagccgcggtcacctggggggctgggggcggggcctgggcggggcggggttcggccgggagcgcaggggcggcagtgcgcgcctagcagtgtcccagccgggttcgtgtcgccatggggyagatcgagtgggccatgtgggccaacgaacaggcgctggcgtccggcctgagtgagtgcacgtcagggacggtggaggctgcagcctggaggggtgtcccaagaccccagccgggacctcgggctacttacagggtggggaagtggggcgccaggcgggccaggccgggccggggtcaggccaggagggtgcggggaacgggggcgggaccctcaggccgcgggctggaaggaggagttctgagacccccagtaattcccttgcagaccctgcggagcgcggcgcccctcccccattcccttctctcggtcccccgactccgcgaaggaggaagttgcagygcaggggaagaggcggttcagccccggtggtttccggggtcaccgccccgaagcccccgagtgggggctccggcctgggcatcgggagaagctcccctgcccctcggtagccagctggcctggaggtcgctctccctgggcttggggtggggaatgggctcatgccctggggctcagcccttctcatctggagtctgcgctggaggcggtctgagatttcacaaggcgccgaaaccacccagtgacggccctgcccagcccagctgcacaggcactttgctcttggggtgggatggcacagcccccagtcaccctcctgtgcatttgctcagaggttctggtgagggcagcggactccatttggaaatggaccctctcgggaccagggccagggagtgtctggcccagcacgggtgaggctgggctcaggcgaggtctgagggcagaggcaccactgcagcagctccaggaaggacctgcaccgggggaggagtgcctgggaagggcctgggggctgagggtgaggaggaggggcccgcygccaccactcccctggggctctgagcgccctccctgttgtctggagggtgcgtggcagctggagtgggagcagagacctcagggtgggagggctggaggacggggccctgcagcctgtcctgtgcccaggaaagtgacckcctgcttcgagtcagcggccaagaagtcggtgggtcagttcagacagctctycccagagctgccccgtgagactcaccctgcctgccccgcactccctacaggaagtagacggactgagggcacccagctgggagccaggagacctgggctctagtctggcctcctgctgaaaccctccaggggctcctggcccgaagagttagagccagactggacgccctgcactgcccgccctggcctcccggctctccggccccctcctccagctgccgtgcttcctttctgttcctagatctcctgagcgtgccccagggcctcggcacaagctgctgcttctgcagagcctcatggctgtctcatttatttctcaattcaaatgccacctgcctggggaggtccttccagaccgtgcagccccaggaggcagctggcccggagacagcagggccttgacaaagagtcccccctgtacacagcaggtgctctgtaaatgtggctgggtgccagaatacgtcctcagacctccctggtggcaccagcggcagctttgcaccctctttcggatggcaggctcgggaccaggacggtccccaaagatgcatggacaattggctgagtagactcaaggacactgccctcccctcctccgacgcagacagacaaacccagagagttaatgtgtagctgggctcaaaccaaggataggaaatcttccaacaagaccatgtggagacaaaaacagaatggctggcagggcaaggtggctacacctgtaatcctagcactttgggaggccaaggcgggcggatcacgaggtcaggagatcgagaccatcctggctaacacagtgaaaccccgtctctactaaaaatacaaaaaattagccgggtatggtggcaggcgcgcatagtcccagctactcgggaggctgaggcaggagaatcgcttcaacctgggaggtggaggttgtagtgagctgagatcacgccacggaactccagcctgggtgacagggcaagactctgtctccaaaaaaaaaaaaaaaaagaaataaaatagtaggaaggaccaggcgccgtggctcatgcctgtaatcccaacactctgggaggccaaggcgggcggattccctgaggtcaggagttcgagaccagcctggccaatgtggtgaaaaccctgtctctaataaaaatgtaaaaattagctgggcatggtggcgggcgcctgtagtcccagctactcaggaggctgaggcaggagaattgcttgaaccctggaggcggaggtagcagtgagtcgagatcgcgccactgcactccagcctgggtgacagagcaagactccgtctcgaaaaaaaaaaaaaacagtaagggggaatattggacaatacccccccaaaaatgtgcagaaatagccatatcagacgaaaccgaaattaaggcaaaaccgctgacgggttaagaggaactccgtatcggggggaaaaagacactcccccaagaagatgcagaaaccacactcggcctgttagctttcagtgcatcaaacaaagactcatggtgacaagggggtccatttgggggtcccagagcccactggggcytgcaggtcgggctgtccttggccactcctgggacccagagcccgggcatgtccagcaccccctccgccagcccgtgcgccacaggctctgctcttcaccagtgcagaggggtgcctcctgggggtgtccccgaccctgtcactgtgctgtggggatgggtagggggcagctctgggtggcctggtggcccacagtaggtagagaaggggggtggcccaggcccccgggacrggagccccacagtgcctgacccacttctccccgcagtcctcatcaccgggggcatcgtggccrcagctgggcgcttcacccagtggtactttggtgcctactccatgtatccttccacctgaggctggggtgggcggggaacgcccagggcagagctggggagccacttcacagtgagctgtttgcctccgctccccaccaccgcagccaggctgggacacagggtgggctgtgcacgggttgggcagcccaggccccagcagccaggcccctcgccaggaccatgtggcgatcagcggcagacccgccagtctaagtcctggtgagtggtgggcagggggtgtcaccagagggccagggccagcactgaggcctccctgttggactgctgggatcccctctgcccgctcctgtcagtcatcccccttgaccggcccctctacctcctctgccccatctcagccctgccgcccagccggaccttgcgacaaggagcactgggcagggtggtgggagggagggcgtgggcagccccgagtgccagacctgttggaacctcccgtggctgcctcctggctctgtgacctcaggcagtggctgcccccgaccttttttgagacagggtctcgctctgtcccccaggctgcagtgcagtggtgcagctgtgactcatggcagcctccacctgggctcaggccaccctcttacctcagcctctggagtagctgggaccacaggcacacaccactgcacctggcttttaaattttttgtagagatgagggtctcactatgttgcccaggctggtctcaaactcctgggctccagtgatcctcccgcctcagcctcccaaaatgctgggattccaggcatgagccaccgtgctcgggcccctctctgtgttgtcttcagtaaagggagttccctgtggcccctcaggctgagctgggctgttccttaaccacatggcttcagtgtggcgggcgtgtttgtgtgcctgctggagtacccccgggggaagaggamgaagggctccaccatggagcgctggtgagtcycctcctgctctgggktctctccgggggytgcggggcccaggcagggctcacagggttgggtggagcttggtttctcacttggaggctccggaaccaaccctttggtgcttgtgggtaaaccaaggccggtgcctgcccggtgtgttttgtgggaggaaagaggcctgggtgccctggggtggtcagcagggcagcaaaggagtcccgagtgggagaggcccagccgcgccgtctcgccttcctccctcccccaggggacagaagyacatgaccgccgtggtgaagctsttcgggccctttaccaggaattactatgttyrggccgtcctgcrtctcctgtgagtccccgtcccgcaccccctctagggctcaggagggcttggagccgaccctccccactgtcccaccggccgggctgcctggacaggagccacccccacttacctcagtgtttttccaaacaaaaattcgggtccctggctctggcagggcctgtgtctgctgtctagygtgcaggatttgtaaggatccactccaaatccgaggagctccgatccgtcgccagggtctggggtcagcatgcactgctggggggtcttgcctgggcttcctggtagggtggagggttccgtgctgtgtgtctgctggttactgccggctgaggccaggacacccacacgtggctgcttcctcygagcaagtgcaccagagccgctagygkccacatcaaggcygagaacacccaggaccgaaacaagccccggtccgcrcacgtcccctgggtctgcagtctgccttgtcctgagactttgtggccttggcccccagacctggggctccgttcccctttctgagtgcccttctgtgtccctgcctctcacccgctgtcccccaggctctcggtgcccgccggcttcctgctggccaccatccttgggaccgcctgcctggccattgcgagmggcatctacctactggtgagtggcgccctctgaggtcggccccggccacccccatccccagcccctgccctgacaccctcggacacgcatggcccttgaagccggctctgtaggctgagccaaggctgggagcaagtgtgagcctgggcgtgtgctcacagcacggcggggacgcagcggttgctgctgccatttttggcgtgtctagtgtgtcgggtcatttccttgcatttcctcattaacccgcaccacagccctgggaggggtactggggtccccactttacagacaaagatgcggaggctcagggaggtgctgtgactggcctggggtcacgcagccggccgaagaccgtgcctgcgcttgggtcccattatcaggcttttctcacctaaaccctattcgcgctgattcatgggcggtgccaggacgcagacattttcttaaactgccgacacctgcgtttggtttatgactgctgcaccctgttagaaggctgcccatcccatgggatacagtgatctctctgagaggccagggatgggtgggaggacagggcgcagcctggccaggccttgggtgaaatgccctctgcctgccctgggctccggaacagacggctgcaggccacctctcactgcgggggtctctgggtggacagagccctcagactttgcttatttaaatccttttgtccatagagccaagtccctcctgccmgcagaggcaactgccctccccttgctgtgcgtcttctagtgtgtgtgcgtgggaaaggtgcagcactttctgtgtacgccttccgcgtatggaagtggagttctgtttcaagcctcactgacctgccaccggcagaactctcctttagaaccccttcctgttgccaagtgctcatctgggctgttgctttgttttccgggggccacccgcatcccccccgtctccctgctgccacgcacagctagtggctcctggagacctcgggaggaattccttgtgctaaacccagagaggaattgctgggtcaggcatcagcctctgcaccgttcaccctgccgggctcagctgctccccagcagacaacccaccaccagccatgtggccccatctctcccaccatgcactaggctttctcccacgcttgccagtttcacagcacgagctggccgtgtggagcttggactcgcccttctctgactgtggatttgagctgttggagtttcttctcccttgagttgcctgttcaaatcctttgcccatttttctattgtggtttttgtatttttctttttcttcttttttttttgagatggagtctcgcgccatcgcccaggctggagtgcagtggcgtgatctcggctcactgcaaccttcgcctcctgggttcaagcaattctcctgcctcagcctcccgagtagctgggactacaggcacgtgccaccatgcctggctaatttttggtatttttagtagagacggggtttcaccgcgttagccaggatggtctggatctccttgaccttgtgatccgcccgcctcggcctcccaaagtgctgggattacaggcgtgagccaccgcgcccggcctgattgtctttttcttaagttgcaggaagtccacatatattttagctatttagcctttgtaamctttaracactggggatgccttcatgctttctggtgagggtctgttaacttggcscgtggagtccttcactgcacggaagagcagaggtttccctgttcacctgctctatggtctgtgctttgtgaaaacacctttccctggccctgggtcctgccttcacgttcctgccttttcttctatcagccttctagttttgcttttcagaatggaatgtttccgttttggagtcaggtaggatcacacatgtccagtttctctttctgttcatgacgtatatgatgtgacatatttttccaccagatattatgggatagaagatgaaaagcacacactcccaggtccacttgacctgttgcagtggaacctccgggcatgggcccaggagtctgtatttttagtaaaagccagtggaatcccgtggtcttcaagctctccccccaccacccccatgtgcagaaatgcctgggcacccttggggggctgccggccagcgtgggtgaatggcgcccaccagacggagcagggcctgctactctcctgggccacccctcctgctggacctcgggcctgcctccctgccttccctgcccttggcaccttgagaggagaatttgagtactagaatttgcatctgggagtgtccaccacgggatcttccagaagcccaggggttcgggccccactcctggcatgaagaaatagcttgggctggtgtcaggccgacccaggtcctggctgtgtggcctcgggcgcgtcacttaacctctctgagtggcagtcacaccatcctgcgtgggattcagacttgagcctgtcccagggcccctagcggggtgggcctccggggagggagggagggagggagggcgggcgctggggcgcggctcaacccttcagtgccccgcaggyggctgtgcgtggcgagcagtggacgcccatcgagcccaagccccgggagcggccgcagatcggaggcaccatcaagcagccgcccagcaacccccmgccgcggcccccggccgaggcccgcaagaagcccagcgaggaggaggctgcggyggcggcggggggacccccgggaggtccccaggtcaaccccatcccggtgaccgacgaggtcgtgtgacctcgccccggacctgccctcccgccaggtgcacccacctgcaataaatgcagcgaagccgggagcgcgtgagcctctgcctggggccggtgggcggggctggggtagcgatggttcccgaggcctgggcaggcaccccgtttcctgccagccgggccgcattccagtttcattaacatcagcatcgccttccttctcagcagcacacgaaatcccgggtaccgtatattccacgaaatatagtacctggattccaggtgtgtgcctccctagaaaggtcctcccgggcctggaggaggcagcagagtcctcccttgacagctcctgcaggccctgcaggccctccacacctaacgcctccctaaggggcttggattccagaggaggccgctggcgttaagtgaaaagggaacagggtcggagccacgtggtgagcctctaccctgcgcctcttttccgtagaagctggggtgaagctggtggcggatgtggccttgtttgcccccacactgatgctggggggccccccagctgcccaggacgctcaggccaagttgcaggggcttctggccaccccttcccctcacttgtgcggaggctgtggctggctgcacacacacctgcccacaggtcctcaccaccaccccagcccggtgcccccaaagctttgcccggcrtcagccacgtcccccacctttgggctctcgccaaggcacccactcccctgaggccggagaagcccttgcctgctgcttgtccacctgctctcccagcaactcacacttcagagccagggtcctctgttcctgggggccttcagaatccaccccccaccagccaacactcggcaccatacagacgtctcaatccagcctcatctcagccgtccccccaggtcaccaagcttcaggtcacccttgaaacccccacaccccacatccaatcctggcccaaatccagaccccagctacatgggccatccccacccaggccacctgccgcctcccgctctgccctcatcccctgaaaccatcctgatgctgccattgaaacccaaagcctcaccccagtgcctccggctcagaatccgcaggctcagaacccacaggctcagctacctccagtgacagccacaagcttctgatggccccagggcagacatgatctgcacccccagcgccctgccctgcccctgcggtccccctctcacctggcatcagccacgcaggccactctctgacccttggacacacgcagcatgtgtcttctcagggcctttgcatgggctcttcctgctgcctggagctgttccctgcatggctgcctggctccttcctcctccccttcaggtcttcgaggcctccctgaccctctgcttagaactgcagccccttggccgggcgcggtggctcacgcctgtaatcccagcactttgggaggccgaggcgggcagatcatgaggtcaggagatcgagaccatcctggctaacacggtgaaaccccgtctctactaaaaatacaaaaaattagccgggcgtggtggcgggcgcctgtagtcccagctactcaggaggctgaggcaggagaatggcgtgaacccgggaggcggagcttgcagtgagccgagatcgcaccattgcactccagcctgggccagagcgagactcctcaaaaaaaaaaaaaagaactgcagcccctcccccagagcctctgtcctggactcactcacagactacacaccacttgtttcattagtcaccgtggaggcaggaagggttttcaccattttgttctcggcctgttcccagtgccaggtgcttagtagaaactcatatggctgggtgcggtggctcacgcctgtaatcccagcactctgggaggccgaggtgggaggatcacttgagctcaggagttcgagaccaacctggccaacatggcgaaaccccgcctccactaaaaatacaaatatgagttgggtgtggtggtgcacgcctgtactgggaagctgagctgggaggatcgcttgaactcagaaggtgggggtggcagtgagctgaagtcataccacactgcactccagcctgggcaacagagcgagaccctttttcaagaaagaaaagaaactcaataaatgtgttgaatgaaaattccatctcctggacaagggccaccacctccaggaagtcttccctgaggcctcttgctttgggagtctgagtggagtccttgttcttctgtgcagcacccccacccccatctccaggcacctggacgcagtaggtgggtgagccagggggccaggcaggggaggggctaacaactgcccagcagccccatggcaatgtcagcccttggggccgggggcctagagactgagaccctgagactgtcacaggcctgggccccctttccacgactggggctgctccccccggggccccttaactaaaatctccaacagagcctgggtcccgaagcgtggctagttcaccwtcagggagggcgcttggccttggatgttgatccgaaccacgaaggctgggggccctgccttgagccgacagccctgcagttcatcctcagagacttgccttgggggccgagagggtgcccctaggcgctcacatcattacaaagcatagggctcaaggcactgcttgaggaaggaggctggttcctgttcccaggggtgtcctcaggggagacactgtgtgggcagagcagggacacctgtgacccccccgtgctacagctcagtcccacctgcatgcactgctcgcggctgcgtagacctttctggaaggacaccccagaattgggtccatggctggcctggaccagggctgaacgggagaatgtcgcattgaatgttggcctctggggatgtgttcatcagtttaataatacacgtacacttaaataattgtttaagaaacaggggtacttccaaggaggttgggaagaggcagcctgcgggggcctgaggccagtgatagggtaagggaagccgggagcaggacagggagccaaggtacaggcagccgtgtgacaccttttctgcagctttaagggctggaagaggtgctgagctccttctacccccaactactgaggctggagatgaggagaacagtggggggctgtcctccagacacggggaatgcccagaccccaagggtagtgttgggggaggcatataaataacaataaatacacataaatagggggtgccctctggggagcacacgtgtccagtctaggggccccacggcctcggcggtcacacygaacggggcagcacgcaggtgcagccgacggggacgtggatgaactcggtgtggaaggcaaaggccccaggtgtggggagccccgagccgtcgcgggagcagggccggcggcgcagcaccagcaggctctggagcagccgcacrgagttgagcgcagctgtctcgcggcccgtccgtgcatcgatacagcctctgcacaggcactcggcgaaggccagcttctgtggatagcggtcctcatccgtgtccacactgcgggacggggtgcacagtgagtctctggccctaccctgtcctcctggaggcccctctcccctcagggcccctctccgtgtactcaggataggacctgaggcagcgagggctgagccacacgggcttggggtgcagtcgggctcacatgtggtggtaatccacgtctccccagggccctccaagagcacagagcagggtccggaggcctctaggagcctcccttccacttcatcacccagccccacttctgcaggagctcaggtgacgggcccagaatttccccaggggaccctggccacctaggacagtgggaggcagggcacggccagccgcaagcagcagctcagccgtccaggtcaggagggccggagggagggagctcaggtggccacgcccacttgacaggtgagaaccrccaaggcccagagagctctccgggcagtcagggccccgccaggggaggggcagccccacgccacagcggaatccccaggtcctcaccggtatctccagggtgagatggagcgctggtgggtgtctgcctccaacacctcctccggccgcagcaccgggcactgggtcgtagctgagggcctctcgtgcctccccctgtggcttgctgcctccaggctggacaccagggctacaggcaaagcctgcccccacttggcacctcgagccagcaggtgtgggggggcctggccgaggggcagttcctcagccgagtagcagtgtggggtaccgtgactgtgggggtgccccctgagggaggggtcatggtgggccaggcatgtgtgcagccaggtcagaaacaggaggccggggaggagctggtgaaacaggcaggtgggtggttaggaggtgcccagggcagggggcacctcacttccacctcagctttccttgttcccagcggaaagatggagtacagccctccctctatagatggggaaactgaagcccagagaggctagcccttcagcccaagacacccagcatgccagcgctccgaggatctgcagctgcctcccctacccccagactgaggggtttcccagaccccatcccaacaccctcctcccaggctcagagaaccccagcccttccatgccaggctgcacatccaagcagcatccatccgagcggcatgtggagaggctcaccgtcatggtggcggcagcggggcaggctgggcttggagcggcctgcacacctggcggcaatcccacaggtgcacctggccatgcacctggcagcagccgctcttatacctgaggccacacctgggggaaattccggcaccacttcctcctcgggaagtgcccagctggkgcgcttcttccttctctggtccccgcagcccccgcctgctgtgcatcaggacacagacatgcaaggaggccccgggaggcgctgtcctgttacccccctcccccgagagagactccgcccaacctgagcacctacacagggtgctgccttgtctgacattctcaaactttttttttttttttgagacagggtcttgctgtcacccgagctggagggaaatggtgctgtcccagctcactgcaacctccacatcccaggttcaagcgattctcctgcctcaggcttccgagtagctgggattacaggcaccccccaccatgcctggctaatttttgtatttttagtacagacagggttttgccatatcggccaggctggtctgaggctcctgacctcaagtgatctgctcgccttggcctcccaaagtgctgggattacaggagtgagccactgcgcccagccttgaacctcctataagagggtttctgcttgcgtatccgtcagcaccttgctgattcaacttgtaggttttcatctggacctgatggtggcggggcgcttttgcaccctatacagttcttctccgtctgctgctggtgggtgccaagggtggttcagtgttttagctgagatggtcaagatcaggtgaggctcacgtgcccccttcacccaggtgggagaggtcccggagatgggggaggcaggcacgtcttcaggtctctgttgggtttctgtgttgtttttttttttgttgtttttttgaggcggagtctgactctgtcgcccaggcggggagtacagtggtgcgatctcggctcactacaagctcagcttcctgggttcacgccattctcctgcctcagcctgccgggtagctgggactacaggcgcccgccaccacacctggctaatttttttgtatttttagtagagacggggtttcaccatgttagccaggatggtctcgatctcctgacctcgtgatctgcccacctcggcctcgcaaagtgctgggatcacaggcatgagtcactgcacccggcctgggcttctgtggttttattgagaaaaaagttcaagctaaaaagtctgagttggaggtgtgaggagtgaggtgtgaggtgtgagtgaggcatgaggcgtgaggcgtgaggtgtgaggtgtgaccagcacacacaggaagctttatgt

SEQ ID NO: 93656 - DNA, 23205 bp, Homo sapiens
ctgccctgagacaggtgacccattcccagtgtcacccagaagactctgggtttgagctgaagattataaagtcaagttatctggggacccattgacagccctcctaccctgccaggcacactcataaaaggcctggataccagacagggagggagaaggctgggcgcaaaagctggaagggaaaggcaatgtgggtggaccccctgcaccaagctggctcacctcatcctccgtcttctgcttcttggctactattcccgtcttgagggctagtttgttcccgcctctgcgtttgcccacctgggtgaagggacagaagactgcaacggttacaggagccgggaccgcccttggcggcgctgaggcccactacaccttcctagcccggcctggtggcccgtcctgacgccgcgcccagctccgccagccggccgacctgcgcagcaatcagagaggagcacacgcgactcagcgcctgccctgggcccgcggtgccctcccagggagcaagaagagtgtccacctcagtagggaccagctctgttctcactttccacgccaaggcctcaccctccctagcagggaccacaagaggtggcaacagctccctttattgagcatgtactgtatgccaagccctgtgccaagtgctgtggatgtatcatctcctttcattttcacagctaccctaagatgaaagttagaaccaccccctttttgaccaggcgcggtggctcaggcctgtaatcccagcactttgggaggtagaatcgggtagatcacctgaagtcaggagtttgagaccagcctggccaacatggtgaaaccccatctctactaaaaatacaaaaacttagccgggagtggtggtaggcgcctgtaatcccagctacttgggaggctgaggcagaagaattgcttgaacctgggaggaggaggttgcagtgagccgaggttgcaccattgcactccagcctgggcaacaagaagtagactctgtctcaaaaaaaaaaaaaaaaaaagaaaagaaaaaaagaaccacccccttttcatagatgaggaaagtctttcaggagaggtcatgctaacaacaaacaatggagctgattcagggtcaggtgggtcgaagcctctggacagcatccttagacatcaagcaacattgccttccctgtgcctagcctggcatggcctctttgagggtgcagccaaaatggcccctcaatgaacaaatgaaaaagatgcaacgacgactgctactcccattcatgaagggactccactcgcaggtatcacaccaaccctggtcctgacgcttttccttccttacccttgcctcaaagagtcttcctctagcctttcatcctgtatcccaccttctcccattgattgagggcttcctgcgctccaggggctccaacagtcttcacagacaaccaggcattcagtaacctgtgctgctgggactatttccatttttttttttttttggagacagagtcttactgtcgaggctggagtgcagtggcatgatctcagctcactgcaacctccacctcccaggttcaagtgattctcctgcctcagcctcccgagtagctgggattacaggtatgcaccaccatgcctggctaatttttgtatttttagtagagtcagggtttcaccacgttggccaggctggtcttgaacccctgacctcaggtgatctgcccgcctcggcctcccaaagtgctgggattacagggatgagccacagagcctggcctgctgggattatttcacaccgattttttttttaagatactctcttgttctgtcatccaggctagagcgcagtggtgcaatcatggctcactgcagcctgaatctcctgggctcaagcgatcctcctgtctcagcctcctgggtagctggagctccaggcatgtgtggcaccatgcccagctaattttttaatttttttttgtagagatgcatttttgccatattgtccaggctggtctccaactcctgggcttaagcgatccacccacctcgacctcccaaaatgttggaattacaggtgtgagccactgcacccaacccacgcccatttttaacaaatgaagaaactgaggcttgcagaggttagatcatttgcccaaaatcacatgctggatccagaactagagcccccagtcttgttattctcaacactttttcctccacactacagggacttgatcttaacaccacagacatggcaagctcagagccaaaaatcaatatatgccctatttacttaatccagagtttctcaacctggcactaataacattttgagctggattattctttgtttgggggtgggagggcgctgccccacgcatggtaggaagttgagcagcatccctggcctctacccatagatgtcactagcaccccctcccgcagttctgacaaccaaaaatgtctccagactttgccaaatgtgggggtggagggaactgccccaattgagaaccaccagtttagcccttcctggaagacaggctctgtgctaaccacttttccaggatcacctcataaaaccctcaccacatcaagagatgctatgatgtctatttttgcaactagggaaaatgagggtaggcaaacccagaggctccaggaaagcagcgatcttgtctgtaagctcaccactgcataccagcacctagcacaatgcctagcacgaggtaaattgctcaataaatggaggttggtcgaataagatacaaggaagtcaagcaattgtcctagataagtaattgtccttacatagtacgtggtctgagtctaacacatatagctcagagtccagacttaaatttactccctttcctcacaattagtggtggtcccatgacccaaggtccgggtaccactcaaacaggaatcctgatatccacgtttcctcattctccacagtgctgattcctaggcaattcctcagctcccagttcccacgggcaagctcctggagtccccactcccgcccctagaccccagttgtcgggaatccaagttccacaccctcagcgggtgacccggacgggcccctcattcagaacggaaagtggacttcggtcccgatcccccttcacgggccccgactcccgctgccaagacaggccgtggcgcccgcccccacccccacggctccttacgaagctaagtgtggagcccggaccgcccttcctcttcggatccccggggccagcggcggcggccgactggtcgggtcgctgcggacccgggggcggctcctcctgccgctgccgctgctcctcctccatcttccgcttgaacagctccaggaagctgccgtcgttggcgaacaagttcacgccgcccgacaccgggctcgaacccgcgcccgacacctcctmgtccccgctctcgggcgacgtccccgatcccgactcagcccaacggctcccgccaccgccaccgcccgcggggcccggagcctcccggccctgaggctccgcccgtctccctcgggcagccattttgtcgccaggtgccgcgcaaaggactccgggaaggccgctccggccccgcgcttggcgcccgactcgcctcgtcccgaacaatgcatgccgggaagagcggtcaggccctccagcgcccgcagcgggggcggggcgaatgagggaaccaacccgaaggggcggggctagggggaggagcccccgtctcgcgggtttttttgtttcgttttttttttttctttttttttcagacggagtttccctcttgtttcccaggctggagtgcagtggcgcgatctcggctcaccacaacctccacctcccaggttcaagcgattctcctgcctcagcctcccgagtagctgggattacagacatgcgccaccacgcccagctaattttgtatttttagtagagacgggatttctccatgttggtcaggctggtaatctcccgacctcaggtgatccgcccgcctcggcctcccaaactgctgggattacaggcatgagccaccgcgcctggccttgttttttaaaaattagagacgggcgcctggctatattgcccaggctggtctcgaactcctggcctcaagcgatcctcctgccttggcctcccctcccaaagtgttgggattacaggcgtgagccatcgggcccagtcttgctgttttggtttttggttttttgtcttgttttggagacagagtcacactccgtctccgaggctggagtgcaaaggcatgatcagggctcacttcagcctcgacctctcagggctgaggcgatcctcccaccacagcctcccgagtagctggaaacacaggcatgcgccactacgcctggctaattttatttattcatttatttatttatttatatttgtggagacggggttttgtcatgttgcccaggctgttctcaaactcctaggctccagcagtcctcttacctcagcctcccaaagtgctgggattacaggcgtgagccaccgagccctgcctctcgggttttcaaaattcagcagtactcaggctggagttccccatacaggggctcccggagaatgagactgtcgtctgagactggggctgtagcttgctctctggagttggtttcacttggggctaggaacagattcgctttccagggctagaatccccgtctgacgacaccaagaataatctctatgagtggaaggacctcatctggggctgtgtgctcagctgacacctgggaacttgaatccctaactggggaatagagagcatgtctagtctgggccccccaagtagaaataggggtatctttgggttgggtaaccatctctgggataaagctcacatttgttggggacatagctggctctgtggagctgaagtccccgtctgagaatcagcttacttttttattttattattgttattattactttattttattttgttttattttattttttgagacggagtctctctctgtcgcccaggctggagtgcagtggcgtgatctcggctcactgcaacctccgcctcccgagttcaagcgattcttctgcctcaacctggtctcgattcctgacctcgtgatctgcctgcctcggcctcccaaagtgctgggattacaggcgtgagccaacgcgcccagcctattttatttatttatttagagacggagtttcactctttcacccaggctggagtggagtgaagtggcgcaatctcggctcgctgcaacctctgccctccgggttcaagcgattctcctgcttcagcctcctaagtagctgggattacaggcgcgtgccaccacgcccggctaatttttgtatttttagtagagacaggttttcaccatcttggccaggctggtcccgaactcttgacctcaggtgatccacccgcctcaacctcccaaagtggtaggattacaggcgtgagccaccgcgcccggcccgagaatcagcttattttatgagctgtagtattcagatgaagtcggggttatttctagtctgtagtctccctctaaagttaagagtgtcatgggctggggtctccatcaagggcctggaacccagcttctgttcctgctctaagacagaggttcaaacatgaaatatggtatactggagtcttctcttgaaatacaaggagacttttaggaattccttctacgaaacggagcgcaattgcaggaatggtgtctgctaggcatgggagatcagggcgtacaggacaagactctgtggactcgcccactctaagccactatcagcccggggacctatcgccaaccgagtcaattcgtctatgattggtttgcggcaagagccaagaggctcacagcctattgaataacagagggggcggacctgaggtgaggttgggacctaccgtgaagaatagagggaaaatgatggacataaagttgagcctatggagtcaggccaaggaggaccgggaatctaacttcaccgaaagggcatggactgggtgtttggctggttgctaaggwgaggttggcgctaccggaacataagagtgattggtgtaagtaagaaaagacatagccaatgaaaggagagctgcaagacctagggcccaatcagtgaaagggagtagcctagaccgtaccgatgtgttcattaggtagggggaacccttggaaaattatagaccagaggttgacaaagtgaaccctggaagcaaagaatagtgaaaatataatttatatttctcctaaaaggcaagtaatgaggaaattaactcatgctcctagcttcgctaggaatgtgatagagaatttcccctgtaggttcttcgtatggtgcgctccgctggatcacgtgagccagttccaaaatggcggcaggggtggccgggtggggggttgaggcagaggagttygaagatgctcctgatgtggagccgctggagcctacacttagcaacatcatcgagcagcgcagcctgaagtggatcttcgtcgggggcaagggtggtgtgggcaagaccacctgcaggtaaggaggctgcggcgggggccaggaggcgtgtaggatataccactgggcgaaggggaggccaaggaccggcttttccaccacgaccggggcatgggggctggcgggggtctttgggtttcactctctggaagttacctggmgcaaatgagaaagacctcaatgcagccctagcaccctctgagttggaccatccgtgttggggctcaagtgccgaaccacagtgaactcagcgcccgggggacggggaagcacttagatatccccatcagctggaccgtacctgagtgaatccagagttgtgggtgagggcggcaccagaacaagcaatcctagtttggtgaaccttggtgttttatgcccaaggcgagagtgagggtggaaagcgagggagagagcacgtgatgagactgtcccaggcagctacaggcaggaggtgtccgttggacagattatcctggacaagcagactgaaccatcctgtgcttactagggaatgcaggagaccccttagcttattaaggaagggggcacggagtcaagctatgctggctggaycgctgggccatgccactgtgcccagcaaaaaagaagcaggcactaggccagacagactcagtcagctgaaccttacctctctagtccacatagaggggtcaggagataaatcagagagggttcctttktagggactgaggctcaatcccaccrtaacccatmctctcctctcaaggcccctgctgattcgggtcacctgctccagggaacctaccactccccttgcagacccagggaacagagcccatcccctcatcccctatcttttgacttttccattactcagctgcagcctggcagtccagctctccaaggggcgtgagagtgttctgatcatctccacagacccagcacacaacatctcagatgcttttgaccagaagttctcaaaggtgcctaccamgktcaaaggctatgacaacctctttgctatggtgagtggaacagggcttagcccccacttctgggaaaagcctcttccagcctttcttgtgcgcacacaccagcagccaccgtgtcctatccactctatatcctgtgtctctcgtgtttcactccttcctcaacatactcacaagggaaccaatgaggaattgcagagcaggaagcacaccagagtgcctgaagcttagtgagccagggtaggggaaggagaagttggagagaccaatcagagccacatggtgtgggaccttatgggccactaagaagtttggcattgactccaggttattaacgggaagctgtttgttttaagcagggcaatgtcgtggccaaattcatgtttgaaaagtaccctttgacggccaggtggagatttaattgtcagtcagggtagaagcagggaaactaacaaggagattgggggtgtaaccagttgagagatgacaacatcctggactctggtggaggcagaatgttgggggaraagtagtcagacttgaggttttttttttttttagacactcaagactcctctgtctcccaggctggagtgcagtaacccgatctaggctgactgcaacctccgcctcccaggttcaagcaatgctcctgcctcagcctcccgagtagctggcactacaggcttgcgccaccactgcctgttaattttgttttttttaggagacaggttttcaccatattggccaggctggtctcaaactcctgacctcaagtgatctgactgcctcggcctcccacagtgctgggattacaggcatgagccaccacatcgcaccagggatgtattttggaagtaaaccagtaagattacttgggtgagaaaaagaaatgaattgattacatgtctttcttgtctctctgagcagctgggatggggaaaactaggaaaggagtaggtttagaatgaacaaataaagaatttcattttgtccacagtgaatctgagttgcccactggaaatccaagtgtaaacatcatgacagtagcttgtttatgtgagtctggagcccagaggaggttggcattgatttggaagtcactgtctcaagggtggcatttaaagctgtgtgagggctgggcatggtggctcattcctgtaatcctagcactttgagaagccaaggtgggcggatcacttgaggtcaagagtttgagaccagcctggccaacatggtgaaaccccatcactactaaaaatataaaccaattagctgggcatggtggcaggtgcctgtaataccagctactcagaaggctaaggtaggagaatcgctagaacccaggaagcagagattctcctgcctcagcctccggagttgctgggattacaggtgcctaccaccatgcccggctaatttttgtatttttagtagagacgaggttttctcacgtctcaaaaaaaaaaaaaattggctgggcgcagtggctcactcctgtcatcccagcactgtgggagaccgaggcgggtggatcacaaggtcaggagatcaagaccctcctggctaacacggtgaaagcccatctctactaaaaatacaaaaaatagctgggcatggtggcaggcgcctttagtcccagctgctcaggaggctgaggcaggagagtggcgtgaaccccggaggcggagcttgcagtgagctgagatcgcgccactgcactccagcctgggcgacagagcaacactctgtctcaaaaaaataataaaggccgggcacggtggctcacatctgtaatctcagcactttgggaggctgaggcgggcagatcacaaggtcaagagactgagaccatcttggctaacacggtgaaacctcatctctactaaaaatacaaaaaaattagccaggtatggtggcgggcacctgtagtcccagctactccggaggctgaggcaggagaatggcgtgaacgcgggaagtggaccttgcagtgagccgagatcgcgccactgctttacagcctgaacaacggagcgagactcaacaaaaaataataaataaaaataaaataaaataaagagatgctgcagagtgaggatgctggcagaggacagtcctcaggtgggatgagctccatccagcatacagacccagaacttgggcgctgccagggtcagggactgggagggaaacaggaggaattggggcacttcccgggcagagatgagggtgttggcagccaatggcttctctttctcaccaaggaacaggcaagggtctcagcagtgaatgggatagaagtttgaggagggagaaaataccacataaacacttattaaggtagcagggggaaccagaattgtctggatcatcaagtgcccattggagatttgtgttcagaagaggggagcaagggcgggcgtggtggctcatgcctgtaatcccagcacttcgggaggctgaggcaggtggatcagaaggtcaggagttaaagaccagcctagccaagatggtggaactccatctctactaaaaatacaaaaattagctgggcatggtggctcacgcctgtaatcccagcactctgggaggccgaggtgggcggatcacaaagtcaggagattgagaccagcctggctaacagggtgaaaccccatctctactaaaaatacaaaaagttagccgggcgtgatggcgggtgcctttaatcccagttattcgggaggctgaggcaggagaatggcgtgaacgcgggaggtggagcttacagtgagcctagatcgcgccactgcactccagcgtgggtgacagagcaagactccatctcaaaaaaaaaaatacaaaaataagccaggcacggtggctcacgcctgtaatcccagcactttgggaggctgaggcgggcagatcacctgaggtcgggagttcgagaccagcctgaccaatatggtgaaaccccgtctctactaaaaatacaaaaattagccttgcgtggtggccggcacctgtagtcccagttacacgggaggctgaggcaggagaattgcttgaacctgggagacggaggttgcagtgagccgagatcatgccactgcactccagcctgggatacagagcgacactccatctcaaaaaaaaaaaattagttgggcctggtggtgggcgcctgtaatcccagatactcgggaggctgaggcaaagaattgcttgaacctgggaggcggaggtcacagtgagtcgagattgtgccactgtactccaacctggatgacagagcgagactccgtctccaaaagggtgaggagcaagatgggaatactcttcaggagtgttcggccctcaagtgcagtgatactaaagagctagaaagccatacctatcatttcagtgcttgcagagactgagacaagaggatcacgtgaggtcaggagttcaagaccagcctgggcaacaaagggagaccctttctctacaaaaaacaaacaaaattagctgggcatggtggtgtgtgcctatagtcccagtaagttggtaggttgaggcaggaggatcatttgagcctaagagtttgaggctgcaatgagctatgtatgagatggtatcttttttttttttttttttgagactgagtttcactctgtcacccaggctggagtgcagtggtgtgatctcagctcactgcaacctctacctcctgagtttaagcgattctcctgcctcagcctcccaagtagctgtgattacaggcgcccgccaccacatccggctaatttttgttttgggggggttttttttgtttgttttgagacggagtcttattctgtcgcccaggatggagtgcagtggcgcaatctcggttcactgcaacctcttcctcccgatttcaagtgattctcctgcctcagcctcccgagtagctgggactccaggtgcatgccaccatgcccggctaatttttagtatttttagtagagacggggtttcaccatgttaaccaggatggtctcgatctcctgacctcgtgatccacccgccttggcctcccaaagtgctgggattacaggcgtgagccaccgcgcctggcctgtatttttttttagtagagacggggtttcaacatgttggccaggctgttttcaatctcctgacctcaaatgatctgcctggcttggcttcctaatacactgggattacaagtgtgagctaccgcgcccggccaagacgctatctctaaaagaaagaaaaaaaaagctggaagtaaccagagtgggggattttgccaacagcaaggggaaagggagtgtttgcagagggaacctgtggaggctgggctggataagggtgccagccaagaggaacactgacagtttacaggggccaggtgaggggatgaagtagtccaaagaagcttaaaatatatgaagcataagaagagggtgcagtgatgagtgggcaagctccccaacagggaatgacccctaaggccagcgagttgggtacttccccatgggacccatgaagttaccaagaagaggtgacagaggaggaagataaagagggaggcattggccgggcatggtggctcatacctgtaatcccagcattttgggaggctgaggtgggtggatcacctgaggttgggagttgaaaaccagcctgaccaacatagagaagccccgtctctactaaaaatacaaaattagctggggtggtggcgcatgcctgtaatcccagctactcaggaagctgaggcaggagaatcacttgaaccctggaggcggaggttgcagtgagccaagatcacgccattgtccagcctagacaacaagagtgaaactccatctcagaaaaaaaaaaaattacaaaaattagccaggcatggccaggcgtgatggctcgtgcctgtaatcccagcactttgggaggccgaggtgggtggatcacgaggtcaggagatcgccaccatcctggctaacacagtgaaaccccgtctctactaaaaatacaaaaaattagccaggtgtggtggcgggcgcctgtagtcccagctactcactgcactccagcctgggtgacagagcgagactccatctcttttttttttttttttttttttttgagatggagtctcgctctgtcgcccaggctggagtgcagtggcgtgatctcagctcactgcaggctccgccccctggggttcatgccattctcctgcctcagcctcccaagtagctgggactacaggcacccgccacctcgcccggctaattttttgtatttttagtagagacggggtttcaccgtgttagccaggatggtctcgatctcctaacctcaggtgatctgcctgcctcggcctcccaaagtgctgggattacaggcgtgagccaccacgcccggccaagactccatctcaaaaaaaaaaaaaaaaaaaaaaattagccaggcatggtggggcatgcctatagtctcagctactcgggaggctgaggcaggagaattgcttgaacccagaaggtggaggttgtgatgagctgagatcgcgccactgcactccagcctaggcaacaagatcaaaactccatctcgggaaaaaaaaaaaaaaaagagggaggcattgagtctgagactggccagggaccccagccatggccatcccttcatagattctacatacatgtttgtgttttgttttgttgtttgttttttgagacagagtctccctctgtcacccaggctggagtgtaatggcgtgatctcggctcactgtaacctctgcctcccgggttcaagcgattcccctgcctcaacctccagagtagctgggattataggcacccgccactatgcatggctaatttttgtatttttagtagagacggggtttcaccatgttggccaggctggcctcaagctcccgacctcaggtgatctgcccgcctccgcttcccaaagggctggaattacaggcatgaggtaccgcgcctggctggattccccatatgtgctgacgacctctgtgccaggcactgttcatgctaagcgctaaggacacagcagtgaactagatggtaaaacccctgcccctgaggggcagacattcctgctatggagacagatgataaacatgataagggaatcatgagggatgtgaggaagggctaatttttttttcagataggtcttgctatattgcccaggctggtgtccaactcctgggctcaagcgatcctcccatctcattctcctgagtacctgggactacaggcgtgagctatcctgcccagctcctaagggctaaaccttaaggagaaaggaaggcagggcaggggtgtcggtggatctgtgctgttacttagggtggtcagggagtctctcagtggagggatgatgatccggaagaggtcatggcccagtcatgggagtatctggggttgcaagtggcaggttgcaagtggggagtagcagtgtaaatggcccgcagtgggtttcagcttccctttgagggccctgggcacagcttgcaattttccccttgtttttgaccctttatgcaaccatacaaaaccctaagtactacctcagggtccccccagccgtgacctaatgaaatgcctgtggtcacagcccaccacaggctccctctggccctgtgcccgggtaggaaggctccccctggccctgtgcccaggtgggaaggctcccccagcagtagcagcaacctcagtctcatccctttggcccccaggagattgaccccagcctgggcgtggcggagctgcctgacgagttcttcgaggaggacaacatgctgagcatgggcaagaagatgatgcaggaggccatgagcgcatttcccggcatcgatgaggccatgagctatgccgaggtcatgaggtcaggcccagccagcaggggtgggggctgcctggggaaggggaagagcggacacagagggcctgacccctgtctcccctcaggctggtgaagggcatgaacttctcggtggtggtatttgacacggcacccacgggccacaccctgaggctgctcaacttccccaccatcgtggagcggggcctgggccggcttatgcagatcaagaaccagatcagccctttcatctcacaggcaggcggcgggggcccccacctgcaccatccaggcagccgggagtgggagtaggcccgggcccccagaccctcaaatgcgcactaacaattccctttccttcccaccccttctcactctggacttctccctggaggggatgggacggagctgtctttcctcccccacaggcaggactcagtgtccctgcccctgcccgctaaataccctagacagagccagaaagcacattccagaaccaggcaacctgccttcaaaccctctacactcaccatgtgacccaactgctgtgtgacctcaagcaaatcacttcacctctctgggcctcaccttccttgtcttgcaaatggagatcatgagagtgccccatgggttattattattattattcgagacggagtctcgctctgtcacccaggctggagtgcagtggtgcgatcttggctcattgcaacctccacctcgtgggttcaagtgattctcgtgcctctacctcccaagtagctgggactacagacatgtaccaccatgcccagctaatttttgtactttttgtagagatagggttttgccatgttgcccaggctggtcttgaactcctggcctcaagcagtacacccacttcgacctcccagagtgctgggattacaggcatgagccactgtgcccagcccccatgggttattattacgatgacaaccctaaagcccccacagtgctgcacaccaccagcaccacccaccatggtgtatgtgcacgtgtgggtgtgtgcgtgtcccctgtggggacctgtgcctcaggtggtaacactgagcacttactgtgtgccagacactattctcagcacattatatgcttcagctcatctggtacaacagatctgggaggtaaagtttagagatggggaaactgaggctccaggagggtcaagccccttagctatggttccctaaaaatggcaaagctgaggccggccgcagtggctcatgcctgtaatcctaggacttcgcaaggccgaggcaggtggattgcctgaggtcaggagttcaagaycagcctggccaaaatggtgaaaccccaccagtactaaaaatacaaaaattagccgggcatggtggtgcgcgcctgtaatcccagctactcaagaggctgaggcaggagaatcgcttgaacccaggaggcggcggttgcagtgagccaaaatcacgccattgtactccagcctgggcaacagagtgagactccatttcaaaaaaaaaaaaaaaagaaagaaagaaatggaaaagctagtatttgaccaaccccaggaatctgcttatgggcctgagcctttaaccactgggaggtatcaggagtcatccctcgggtgtttagtgaacccccaacccaggaggtcgccgcaggtaagctatgagccctcccacatcccccctgcagatgtgcaacatgctgggcctgggggacatgaacgcagaccagctggcctccaagctggaggagacgctgcccgtcatccgctcagtcagcgaacagttcaaggaccctgtgagtggtggtctggctggcggtgagaggcccgggggctgaggacaggggcagaccccgcccctcactgtcctctctcgtgccctgtaggagcagacaactttcatctgcgtatgcattgctgagttcctgtccctgtatgagacagagaggctgatccaggagctggccaagtgcaagattgacacacacaatataattgtcaaccagctcgtcttccccgaccccgagaagccctgcaaratgtgtgaggcccgtcacaagatccaggccaagtatctggaccaggtgtgcccacccacccagcactggctcagcagaggcacctctgcccctttattctctgatcttttgctccaccrtctggccctctgccctctarcctcctgccctttgcccccacatttcagatccttcacccttattccggccatagaggactgtggctggcctggcctaggtccctgtgaccctggagagcagggggtctagcccagtgatctctgaccatagtgatgcagctcccacttatgacaccttaagctcctgccctatattctctccctgactctggaagctttctagctttaccgcttctattgatccacactctgtctctgccttcctgccccctgaccactgccttctaccctctgccctggctgcagatggaggacctgtatgaagacttccacatcgtgaagctgccgctgttaccccatgaggtgcggggggcagacaaggtcaacaccttctcggccctcctcctggagccctacaagccccccagtgcccagtagcacagctgccagccccaaccgctgccatttcacactcaccytccaccctccccaccccctcggggcagagtttgcacaaagtcccccccataatacagggggagccacttgggcaggaggcagggaggggtccattccccctggtggggctggtgrggagctgtagttgccccctacctmtcccacctcttgctcttcaataaaatgatcttaaactgctgtattgttgacattgggaggtgagggtaagcacctttatgtacagttgcacaggttgtgcactggacagaagtgtcacatctagaggggcccattcacaacagagacctaatagagatgcrtgtttattgtggcaactttggaaggagggtgtcttgggtgagagatacctttgtctcattctgtgtgggttaaggtgtccctgttgggcctgtgaagcctggaatggaagacagaggcattttcccacttccttggaggctcagagcgtgggaactgggaggccccttggccagccccaggctggtggggagcagagcagattaggccggcagtgggcccggcactgcctgctgtttggtttgggaattagtgggcgccctggggagaggccaggcctgccagactggggattaacagtctccaccccccaattcctgcccccatgggatggcatcagcccctcccagcaaagggctgcagcaagggggctggttagtgggcagggtgacagaggactccggctggaggggctcctgaagtctcatcctgactccagagcggtctcaggctgtgggcacacaggcctggaaggcacctagtggacccccttatcccctgcccttcgctcctccctctgccactgcctgggctgctattgttgtccccacttgggagactcaggatggggtatgaccttgagagtttacaagttccaagccagagctggctaggggggacagaaagggggttcctgaggacacacgtgagtcggtgttcaggccgggcgcggtggctcacacctgtaatcccagcactttgggaggccgaggtgggtggatcacttgaggccaggagttcaagaccagcctggccaacatggcgaaacctcgtctctacttaaaatacaaaaattagtcgggcatggtgttggggtgcttgtagtcccagctgctccagaggcttaggtgggagaatcgcttgaaccccggaggcagaggttgcagtgagccaagacagggtaagaccctgtctcaaaaaacaaaagtggtgttcaggtccagtcatggtggctcacgcgtgtaatcccagcactttgggaggccgaggcaggtggatcacgaggtcaggagttggaggccagcctccaactactctctactaaaaagacaaaaattagtcaggcgtggtggtgcccacctataatcccagctacttgcgaggctgaggcaggagaatcacttgaacctgggaggcagaggttgcactgagccgagattgcgccattgcactccagcctgggcaataaagtgagactccgtctcaaaaaaaaagtgttcagacccagagtctgggtgtgccagggtgtgtgtgtaaggggaaccccaccaggagcctagacttgtcactccaactccctggggtgtgcacaagcaggtgtgggcctgttggggtggcatgtgtaaacaaacacgatggtacagccggctccgcgccaaactgccaggatccaaatcccagctgtgctacgaacaagatgagatgtgacatcggagcctcagtttccctacttagatagtaagatgaccaacttagcatgcccgtaaggattccatgagatgaaacacgcaaggcgtttataccagcaccagacaggaaaccgcaagaaatgtttgttatttttcgttgtcacaattagtaagcatatcaaatagcccaggaagcctgcccccagcccctgcgggaattcagcagtcggaagtgtgtggggatgcgggtgagctggggtagggaggatgaaaaggaggagcgggcttcagtgaatgcaaggacacttcctagggagtgagggctgctgatcgagaactgagctcatcagcaccgagcctgccaccgccttgccaggttccgcagctgacggcaccgccccagctgccccctcgcccccatttatgggctgtccggcagctggacagcgaaggcatgggtcacagggtgaccagcccaggcgggttcctaattactccgggcagggtgaacatctgccagtctgggaacacggcgtcccagmctgctgggcttggaacctcgggcggggctatgtagaatgcacgaggggctcctgagcactmtaggatgcccatcccagggtttgacccctgaacttctgcccctcccacaccaatctgtgtgttaatgttcttcaggctgggcaatggagggggagtgggtactgtttgtaccaggctgggagtgtcccctttagaggtgtgtctgtgaagaatgaacatctgcccagaatccatgccaaatgcaggacaaggttttgtgtccccaagcttgtgtgttcatggcaatgctgagagtatctgagacctgtgggtgtgggtgtgggcctgccgccgggagggagcgttggaaagggggttgccttcacatattggtgtacaaatgctggtgaatttcaccagcggtgatagctaggggacccttgagggaggggtggctgttgtgtgtgtctttgcaagattggtgaacctcaggccccgctctgagcctgggattgtgtgccaccgcactgaggaaagggtttttgcatttggtgtgtgatcatggctgcatctttgcacagggaagatcgggagtaaaacctccttgcagtggagtatgactgtgtgtgtgaaggcattctgaggtctgggtggggtctggcacttggctggttgtgtgggtgtctttgttacatggcgtgatcatgacggaattcagaccgttgggagagccgtgtgtatgaaagaggagagcctagtatgtcagggtccacctgccttatatatgcgtgatggaggcaggaggggtcgaggtaggtgtgtcttgtgtgaccctggaaggttctgtgacagtgtgtactgctcctctgggtaaccatagttatgtgaggctgtctttttgttttttcaatagagatggggatctccctatgttgcccaggctggtctcgaactcctggctcaagtgatcctcccacctaagcctcccaaagtgctaaaattacaagtgtgagccatcgtgcctggctgaggctgtcttaagagcagctagatttgcttctgggactatgatgtgtgtttctgcgtgcatctctgtgacactgtgtgattacaggtgactgtgaagtgacccagcctcactgagcagtgtgtgtgtttctgggactgggaaaaagaccatccctgcctcctcccccaacctctgggttccagatccctaggacctgccagtgagcgactgggaggggaacagggaggggcgagggaggacaaggcggatttctccccccgtaccaggtaacaaacttgtgggactccaaacaaaattctgaagctacagcctagccgagggaggaggaccaggaaagggaggcacgcccactccccagccccacccaacgccaaagccacccgcccattccatccctgtccctgtgggtccttgcaccggccaccttcaacacaggtgagatgagcccaggcttggggaaatagggggccctgagggaagagggaacctgcgggcaggaatgcatccggagtcctcccggggcggggagtggagggcttggaaggctggaggggaacggagagaggaaaggtcaaggcggatccgggaggaaaagggagtggggggagccagggcaattaagcagaaggtgcacaggctggggcaggggggctaggggacctggaggcttagggacagggcttcagagggagtgcagggagcagaatgggtcaagactgggagctggggaagtggagaagggggagccagaaataggggctgagggagagaatttgggagaggtggagccttgagaacctagaaactcaggtgctggggacttgcggaatggggcatgctacaggtggcctctgggtgaaggggatcgggcagagggtgactcgggagctgactgcagggactcaagggtcttggtggtgggggacggcagttaccagagcccacggccaggagtccagggaaggggacagcctgagatgaaggtcagggaggggcactgggggctggactagactgagtaaagctgggaggagaaggcaactcaggcaagggtcaggactgaaggggtggcgggccggaacatgggtggaatccctgtgctcagttatccccgcacctctccacccacacccgcagcccccacccgggccacccactctcccttggccacacctgccgggtgccacgatgaccgtcacctacacagcccgagtggcgaacgcccgcttcggtggcttctcccagctgctgctactgtggcgtgggagcatctacaaactcctgtggcgagagctgctctgcttcctygggttctacatggcgctgagtgctgcctaccggtgaggctgccctgaggtgctcatgttctagcggagggggggcagctattatatatatataatatataaaaattataaaaatatagagatatataagtatatatatctatgttttttaaactgagatggagtctcactctgtcacccaggctggagtgcagtggcataatcttctcttacttccacctctgcctcccgggttcaagcgattctcctgcctcagcctcccgagtagctgggattatgggtgccagccaccatgcctggctaatttttttgtatttttagtagagatggggtttcaccgtgttgaccaggctggtctcaaacttctgacctcaagtgatcctcctgcctcggcctcccaaagtgctgggattacaggtgtgacccatagcacccggctgggggcagctattataaaagaagccagggtgaggggcacagcaagagagatctgaagctggggatggagtcacccttgtgacctgtgacccctcatctctatcccgcagctttgtgctgaccgaagggcagaagcgctacttcgagaagcttgtgatttattgtgaccagtatgccagcctcatccctgtctccttcgtgcttggtgcggtccaaccccaagtcccccgttcccatgtccctgagaaacccatatccattcatgccttttgaggagcccccattcctgcccctctgagatcccccccctcaaatccaaccccgacagcactgcccacccatttttggatccatatcatgaagatgccagatgtggctctacactctgagacctggggtgtcacctggggtcacagtgccccctgaggtgcccccaggagagctccatctcacacacaggacttattcctggtcaccctggggattctcaccagtgtctgttgtgttattaggggggacaaacccctaaccctccagggaccccataggactccatcctctcaattccagcctgggggcatttctctgacaagtcttggacccctagtgaccacaagtgaccctagcctgcccaaggctccctgatgtagaccctgtccccaaccccttcagaagttcctggctcaggggccgggtgtggctactgtgacaagcctgaccagatgtctctgatgtacacccccacaaaccaggcccctctccccttgttttaggtccctatgccttcacagcaagcaacagtctgcccacgtgcccctaacatgggctctgtgcctctatccccatactgggatcccaatgtcacatctgaggtgactcccaagtagccagtgacccaaagggctgctctgcctttttttttttttttttttttttttttttttgagatggagtctcgctctgttgcccaagctggagtgcaatggtgcgatctcagctcactgcaacctccgcctcccgggttcaagtgattcttctgcctcagcctcctgaatagctgagactacaggtgcgccaccatgcccggctaatttttgtatttttagtagagacggagtttcaccatgctggtcaggctggtctcaaactcctgacctcatgatccaccctcctcagc

SEQ ID NO: 93657 - DNA, 20855 bp, Homo sapiens
agcctgggctgggactaggatgaacaaagtgaggcccctagggcacaaaatttaaggaggcactcactctcagaggccagccaagtccaagtcccgccctctgcaacccttcttcccctgtaactacagcgggcgccgcgccctttctcatgtccggggccccgccccctcacctgtgtgcgtgcgcagatgcgccttcaggtgggagctcttggtgtagctcttgccgcaacccgggtgcgcgcacgtgtgcgctgcctgcctcttgcgcgcccacgaacgtcggcctcgcttggatggcgcggtctcggctatcacacctggatcctctgcagtccccccgagtccagtgcccaccgtcccgggtcccaaacaactcaggaaggagggggacgtggcgggaccgggcgcgggtccctggagcccgcggaagagctggaagtgcccttggtactgaggcgccgggtacatcgcggggtacccggacagtagcccgtagggggcgcccgacgccgcaggcactgaaagcccggtccgcgggaagtagccacccgaggagccggcgccgggccccgggtacaccggttgcagcgccagcgccttgggctcgggggccggggctggagccagggctgggcccacgaaggcgtcgggagcccgggctcgcagggcagggcgcacccaacccgagtgatcctccgaacccaaaagcccagccaccagccccgggccgccagcatatgcgcccagagtctcgggcggcggcggatattgcgccccggaggcctcgctgggcgccagagcgcaggtctggggcgcgccaccgggctccgggcccgagaagttggtgaggaggagatccaggtcccaggtggcgtccgcgcccctctcatcgtcctcttcctccccgggctggtcctcagacttcacgtggaggggcggctccgtggggtcaggaggacccgggcccatgtcctgcgcctcttcggagcgccaccactgcgggagggagcaggcagctcgaggttcggtggacactggggtgccctgcccagggacatcgcgggctggacactctgacgcagaggctttggaaaggggtcttgtttgcctgtctgtctgtcccacttccccaacactgcccctctaaccgcccctctccccgctccccccccagctccagggacagaaaccgatcaggtctggctggagacaggagataagacttccactatctggaaccacactcggggatgggggaaggggtagcagagctgctggagatggaaaactggcaggggacgggggagaggatgccagccttgacttagttttcccccagaacatccctctccttccctgtctcccaaaacaagattaattccgaaattttggatgtcccccagacacactcatcatttcccgctgatatctggaagattgtctgtgagcctagatctcgttcctttttttttttttttttcttgagatagggtcttactcttttgcccaggctggagtgcagtggtgcagctcactgtatccttaatctcctgggctctaatgatcctcctgcatcagcctacggagtacctgggactacaggcacacgcccccatgcctggcctaatgtttttggtattttttgtagagatagggtttcaccatgttgcccaggctaccttcgttttctattaccgaaatagatcacacttagaacctcaaacccctagaccaccctcctcaccccctgccagactaagctgagatctcctctcctggactgagcgtacctcagtcctggttaagtctcttgatttcaggtcaagatgcaggtctggaccccaagatctgtgactgtggccctggattccagccagcccacctagaccccaccttctaggccccaccttgaggaagtcatcctgtgtgtccgggaaggggcccagggcggtcagtgtgctgatggagggcaaggcggtctcggctgtggccatggctggctggtgcccaccctgggcctcaagcctcctcttcctcggctgcctcgtgaactctgaggctgtgatagccccttcgagggctcctctctgtccttagctgattggctgcagcctctgataaggcaaagcaaggcaaggcggcgggggggcactgtttctggggcacaaacttcacgttggcctgtctggggctggggttaaagactaaccctgtgtccaaagccaagtcaaatatcaagggttggggggttcagggtttgagggtccaggtgctgggtaaaaacagacattgggtctccaaagaaggagagacttgggggtcttccctcagttaactttcctggaaaaggcagaaagggtattctgggaagaagctgtgggaccccctgtccccctgattgaggctccacagccctccccctccccagtaaacagcaacaaccgtgctgatggcgggacttggcacgagctccccgccaagcattatcagacaccccagacgttggaggctgctatcaggtgggggcccaggccagctagagctctgtcctccggtgaaggggagggctgggagttgggtcttcaaattagcctggcgttcaatttgcctgggttgggacctcccagggtctcagccctgcagcaggaggaagcccctgacaactggcccaccattgtctactggggacccttgggtggcactgcatgggactgcatggaggctggttcagtgccagctgctttagtgcgatgggggcagccaagggaaaagtgaccctctctcctcctgggtgggataggaccgttggatcaagccacaggcagtacctgacctgcaggagaccagtgccctggctctgggcctggctgctccttgattctgcccaacatgaggagaggatctgagtttctacaacaggaacctccactctggtgccctgggagcctgggaaggggacatggatacgtattacagacacataactcatagtcactcattggaagactgaggcaggaggatcacttgacaccaggatttcaagaccagcctgggcaacataaaacctatctctccaacaaaaagctgtgagtggtggtgcatgcccatagtcccagctactcaggaggctgaggtgggaggattgcctgagcccaggaggtcgggactgcactgaactataatcacaccactgcagtccagcctggggcacagaaagcaagactctgtcgctggaaaaaaaaaaaagttgggtggccatctttattcctggcagatcaacctgggtgacacaaacaaaaacaaggccaggtgcggtggttcacacctgtaaccccagcactttgggaagccaaggtggggagatcacttgaggtcaggagttcgagaccagactggccaacaggatgaagccctctctctgctaaaaatacaaaaattagctgggcattgtggcacatgcttgtaatcccagctatttgggaggctgagctggagaactggttgaaacttggaggcatggggccaggcgcagtagctcacgctagtaatcccagcactttgggaggccgaggcaggcagatcacctgaggccaggagttcgagacaaacctggccaacacagtgaaaccctgtctactaaaaatataaaaataggccggggatggtggcatacacctctaatcccaggtacccgggaggctgaggcacaagaatcacttgagcctgggaggcagaggttgcagtgagccaagatcatgccactgcactccagcctgggctacagagtgagattctgtctctaaaaaacaaaaacaaaacaggcttggagcagtgagtagtggctcatgcctgcagtcccagcactttgggaggccaaggtaggaggaatgctcgagcccaggagttcaagaccagcttgggcaacatagcgagatcccatctctaaaaacaaaaacaaaaacacagttactcacaggaccatgcaattacataatgacatgagttcctgttccctcagtcacactgatcatataatccgtgcacatataattgtgtgtctgtctatgtatatggactatgcacagacatacaattcccaggcactaaaacacaaccctatgctatattggttacacaatgtcatagccaaacaatctctaaaacacagaattcataatccacaggcaggcacacagttatacaatcctactgacacaatttagccgtaattgagcagacacacatggggagtcagatacattgtcacagaactttttttttttagatagtgtctctctctgtcacccaggctggagtgcagtggcatgattttggctcactgcaacctccacctcctaggctcaagtgattcctctgcctcagcctcccaagtagctgggattacaggtgcctgctaccacgccacgctaattttttttttttttttttttttgagacagagtttcactcttgttgcccaggctggagtgcaatggcatgatctcagctcactgcaacctctgcctcctgggttcaagtgattctcctgcctcagcctcccgagttgctgggattacaggcacccacaagcaggcctggctaatttttgtatttttagtagagatggggtttccccatgttggccaggctggtcctgacctcaggtgacccaccctccttggcctcccaaagtgctgggatgacaggcatgagccgccccagccagtcaaaacctacactttatacagtcacaccaccggtcacttttacaatatgtaaagtaattatttagtcacagttgcatagctaccagtgcccaaccgtaggggatgcacccagttaaacacagacaaacgcaaggacatggcatcacaggtcctgagaatcaagacacacacatttctcaacagatacacaatcagaatgggtgcaccacaaatgcactacacaaaaagacaaaacaggcggggcgcggtggctcacgcctgtaatcccagcactttgggaggccgaggtgggtggatcacttgaggtcaggagtttgaggccagcctggccaacatggtgaaacccgtctctattaaatataagaaaaaaggccaggcatggtggctcacacctgtaatcccagctactcaggaggctgaggcaggagaattgcttgaatccagtaggcagaggttgcagtgagccaagattgcgctactgcactccagcctgggcaacagagtgagaatccgtctcaaaaaaaaaaaaaaaaaaaaaaaattagccaggcatgatggcatgcttcagtggtcccagctacttggaggctgaggtgggaggatcgcccaggaggtggaagctgcagtgagctatgatcgcgccactgcactccagcctgagcgacagaacgagaccctgtctaaaaagaaaaaacaaaaacaaaacaaaacaaccacatagactcacagaatcacacaagttcacacacacacacacatacacagacacagacacacacacacacacacacacacacacacagagtcacaagtatctacatgtgcttcctgggacagactggcagaaaggtttgctaagatcgcccacttggagctcgtcttccccacaaccagcacccaattagagaactcgagtctggcctcctgggttcaggaggacgcctagtgctcgcgccagaatttctttgtttaattcttgactccctccgcacacaccccctgcaactgaccaaccaggagtgggccgagccctttcctacggccaataagaggagaaacccagctggccaatcggtttcccgcactcgtcttccgcccctaccccgtccgcttcttaaaggggctagcctatctctgtctgggccccccgatttccacaggcaaggctaccttagcccttttaaaaggcagagctgcggagggggccggattctaggaggaaccaatgaaaagcctcactcggcctccgctcctcccacttcttgctgaggtcaaaggcctgcgtcagttgcactgtagcctcggcagtgaaccgggaggtactaccaggtaaggaaggtgcggtrgccccagccgtgggtgagaggagctccgctctgacacccccgctcctgtaggtcgccgtcgttgctccgctcgctctgagagagcatggccctgagaggcgtctccgtgcggctgctgagccgcgracccggcctgcacgtccttcgcacgtgggtctcgtcggcggcgcagaccggtcagtgtggggtcgggagtgtggagggaaggagggaggaactgggggtttagggactttccggggtgactttcccgttctgtgcttgcagagaaaggcgggagaacacagagccaactggctaagtgtaaggacctctggtcgcaccgtgtgtctgctgcccctgttcagctgyctgtctgccgcaggtsgactctgtcccagaatccgagagctgcccgagcggggtggcagggtcgtggccagggtcagaggcactaaggcagtgagtgcgctgtgcctgcggggccggagaaaagtcacctgatcagtctcgcttgcagctcgcactagccggggggcgacatgggtgtkggkgggtasggctgatgagggtccgagaagggagggcacagtgatcttgcggactggaccgaggcgaattccccttcccagcctcgcgtcccgagtttgactggcaggacccgctggtgctggaggagcagctgaccacagatgagatcctcatcagggacacctyccgcacctactgcyaggagagactcatgcctcgcatcctgttggccaatygcaacraaggtgggcgggctggtgggtgccctgagactgctcctccgcctggagccatagccaccccacctcaaggcccctctgtccttggggctggggcttcctgtggcctaggcctgggcctgaatttgggcactggtccctttgcagtttttcatckggagatcatttcggagatgggggagttgggtgtgctgggccccaccatcaaaggtaggaacaagtatctctccacacactgcagaaccctctgtattctgaaagcctcttcctccttccctccctccctttcttccttccttctctttcttttcttttccttttctttcctttcttcttcccccccaacagagtctggctctgttgcccaggctggagtgcagtggcacgatcttggctcactgcaaattctgcctcccaggctcaagcgattctcctgcctccacccctctagtagctgggattacaggtatgtgccaccatgcctggctaatttttgtatttttagtagagacagggtttcactgtgttggccaggctggtctcaaactcctgacctcaggtgatccgcccacctcagcctcctaaagtgctgggattacaggcatgagccaccacgttcagccttctttttgagatggagtttcgctcttgttgtccaggctggagtgcagtgatgcaatcttggctcactgcagcctccacctcccgggtttaagtgattatcctgcctcaggctcccgagtagctgggattacaggcgtccgccaccacgcctggctaatttttgtatttttagtagaggtggggtttcaccgtgttggccaggctagtctcgaactcctgacctcaggtgatccacccgcctcagcctcctgattacaggtgtgagccaccgttgcccggcccttttcttttttttttttttttgagatggagtttcgctctgtcacccagcctggattactggattacagtggtgcgatcctggctcactgcagtttcctcctcctaggttcaagcaattctgccacctcagccttctgagtagctgggattacaggggtgcaccaccacgcccagctaatttttgtattttttagtagaaatgggatttcaccatgttggccaggctggtcttgaactcctgacctcaggtgatccacccacctcggcctcccaaagtgctgggattataaacgtgagccaccgtgcctggcccctttgtttctttttttagagacagggtctcactgtgttgcccaggctgttctcaagtgatcctcttgccttactgaaagcccccttctttccctaagccacaatttcccagtctgtaaagtggggctgttgtcccaccctctgaaagtggctgtggagatgaaatgaataaacctcagctagggccagcttggtgcctgcctccttgtgtgtccttattcagccctgtctcttgggtcttagctgggcagggccctgttctctattgtcctgctttcccctcctactaccaccaggayatggctrtgctggggtttygtctgtggcctatgggctcctggccbragagctggagcrgrtggacagtggctacrrgtyggcgatgagtgtccagtcctccctcrtcatgcaccctatctatgccyatggcagcgaggaacagcggcagaagtacctgccccagctgggtgagtggctgcccatggggcctggtggaaggaagacagtctctgaggtctggaactcaagggtggggctgtcccctgagcctattctgtccctatctcaaagatagcataagtggccacctggacccccgccagaccctgggcttcacctggagatctgatccctggccagcctgactgtccccctctgtgaccaccgtcatctccctatgctttctgtgttccccagtccagcccaaagtttaaagtccaccaggttcctgctggccatttgcagtggctcacacctataatcccagcactttgggagggtgaagtgagaagatcccttgagcccaagagttcgaaaccagcctgggcaacgtaaggagaccccatgtctattagaaaaacaaaaaaaggaaagagcctatgtgacctgcgctaagtggacgttggccctcttccgtggtgtctcggaggtgttcagctgcttcaagatgaagctgaacatctccttcccagccactggctgccagaaactcattgaagtggacgatgaacgcaaactttgtactttttatgagaagcgtatggccacagaagttgctgttgacgctctgggtgaagaatggaagggttacgtggtcggaatcagtggtgggaacaataaacaaggtttccccttgaaacagggtgtcttgacccatggccgtgtccacttgctactgagtaaggggcattcctattacagaccaaggagaactggagaaagaaagagaagatcagttcatggttgcatcgtggatgccaatctgagtgttctcaacttggttattgtaaaaaaaaggagagaagggtattcctggactgactgagactatgatgcctcgtcacctggggcccagtacagctagcagaatccgtaaacttttcagtctctctaaagaaaatgatgtctgccagtatgttgtaaaaaagcccttaaacaaagaaggtaagaaacctaggaccaaagcacccaagattcagcgccttgtcactccacatgtcctgcagcacaaacagcggcgtattgctctgaagcagccgcatattaagaaaaataaagaagaggctgcagaatatgctaaacttttggccaagagaatgaaggaggctaagaagcaccagggacaaatcgtgaagagacgcagactgtcctctctgcgagcttccacttctaagtctgaatccagtcagaaataagattttttgagtaacaaataagatcagattcgcaaaaaaaaaaaaaaacccacaaggccctgtgtgaccaggcctctgctgacctttccacctcatctctggccactcatgtgatcctcccagccagacttagctacttgaaattctccagaagtaccaccagttctttacacatctgttccctctcccagcactgctcttccccacagcctcctcctgcttaactcctcacacccttccagtttggccaactccttcctgattccctgggtccccctccccatcttggcattgtgatcatgactttggggtaacctgtctcttgaaagcagggccagatctaacttagttatgaggtctgactcaggggcgagggtaattttttttttctttttttgagacaaagtcccgctccgtcccccaggctgaagtgcagtggtacaatcttggctcactgcaacctgcggttccccagttcaagcaattcctgtgcctcggcctcccaattagctgggattgcaggtgcttgctacccgtgcctggctaatttttgtatttttagtagagatggtgtttcactatgttggccaggctggtctcgaactccagacctcaagtgatccatctgccttggcctcccaaagtgctgagattacatgtgtgagccacctcgactggcctaattttttgtatttttagtagagatggggtttcaccatattggtcaggctggattttttttcttttttgagatggagtcttgctctgttgcccaggctgtagtgcagtggcatgatcttggctcactgcaacctctcctgcccgggttcaagcgattctcctgcctcagtctcctgagtagctgggattacaggcacccaccaccacatctggctatttttttttttttttttttttaagtagagatggggtttcaccatgttggccaggctggtctggaactcctgacctcaattgatccacctgcctygrcctcctaaagtgctgggatgacaggcgtgagccactgcaccccgccacgaggataatttttgagtaaggggatgtatcagggaccaggcagccttgtgactttgtcttgtgcctgcagccaagggggagctcctgggcygcttcgggctcacagagcccaacagcgsaagtgaccccagcagcayggagaccagarcccactacaactcatccaacaagagctacaccctcaatgggaccaagacctggtaagggttctgggtggtgggcaggtggtgaacaggggcaaaggggcactggtcagacccctcaccgactgttccatccccaggatcacgaactcgcytatgrccgatctgtttgtagtgtgggctcsgtgtgaagatggctgcattcggggcytcctgcyggagaaggggatgcggggtctctcggcccycaggatccagggcaagttctygctgyrggccycagccacaggcatgatcatcrtggacggtgtggaggtgccagaggagaatgtgctcyctggtgcatccagccygggggtaagtggcagccactttgggaatgggtgttgggtcacctgcggatgcggctttgtcaggcaggctccgtgctggggacgcggctccctgtgcctgtggagcccacacagtggtgattcttactcagccggactcgctgacgtgctgaaaactgcccccatttggtgaccgtctcgctcatcccggctctgcccgggacacatgggcctgaaccagctcagtyatttgactcacagtgcatcttctggcatccgtcagcctcctggctctgagcatcgaacccagatgccaggctgggtgggactgtgtgcaaaccgagtgagcaggcaccgagcttcagtgccagggccatctgtgatgtgaaccacaacctgagtccccctgcgtggggtggctggggaggaggctttccctgcttcagagttggttctgcataggccctcttggtgtctcttgggtgggcctgaggcgccatctcaaccctacagggtcccttcggctgcctgaacaacgcccggtacggcatcgcgtggggcgtgcttggarcttyggagttctgcttgcacacagccyrgcagtacgmcctcgacaggtgtgtgagggctgcagtgagattctctgggggtgtggggcagcttgggtttcactctctataccatgggtgactccccagcccccacccaccaggcctgagttccttgctctggaatgaccagtgacgtccttctgagcagctgtgggctgagtcaacggcagggccagggcaagcttgggggcactgaggcagcctgggaaggcgtcctggagcagggggccccaggacagggacggggtgggagagtgggcctcccctcgctcttaccctgccattgcccatgtaggatgcagtttggtgtcccactggccaggaaccagctgattsagaagaagctggcagacrtgctcactgagattaccctgggccttcacgcctgcctgcagctcggcyrcttgaaggaccaggacaagtaggggctgtgtggtgggggcggggggatggcagcggtggctggaggaccttgtgtccttcctggagagaaaggtccttcctgcctggtggccctggggacctgaaccttctgctgtccctcttgtccttgatgggctgggctgaggacagccccactggtccctcattgggagcttggctgcatcagggaatccccaccccgggctaggtttgcttggagcatcgggatgccaggatccccagtccttgttaccctcatgtgccactcccagggctgcccccragatggtttctctgctgaagaggaataactgtgggaaagccctggacatcrccyrccaggycbragacatgctgsbgggkratgggatttctgacgagtatcacrtgatcyrgcacgccatgaacctggaggccgtgaacacctamraaggtaggagctggacctcagagggctcactgaggcctcagtgtctggggagggggtacagggaggtgggayggggacaggtctgagtccaactccacctatcactaagtgacagtgtgacctggggcgagccttacccctctgtccctcatctggagttactcacatggggactgtggaagtgaagtgcttcatgcagcacacagaggccccatcaggccttgcgaggggctcccagctctttctcccacatgctcgggaggagggatgttcctgagacaggtaagctccgaaggcagcccaggggtgaggcccgactcctagcaggctggtggacgcaagggagtgagcgaagctacacgcaggaatcaacgctccattttgttaagagacaaaagtcatcttcagatgacggtgtttgcaccctgtaactgatggtgatttacatgggggtccagaaccccttgcttggtgggaagacagatgtggaaaaagatacttaaaaaaaaaaaaaaagtgcaaacccagcatgcgctatgtagaaatagagggaggtatgaggaccccccgggcagagatgcttccagacagagagaacagcaaatgcaggaggggtgccttccctgcgcaccttgcaaccccagatcttgtctctatctggcatctggggggtggggggatcctacaaatgtgagaatgaccctgaggacaagcagcgggcgccatgagatggttttatgcagagaagggatgagtcagatttggtgctttaggggctcggcgcagtggctcacacctgtaatcccagcgctttgggaggctaaggcaggaggattgcttgagcccaggagttagaagttatgatgagctatgatcaccccactgcactccagcctgggtgacagagtgagaccctatctatatttaaaaaaaataggtttgtactttaggaagtaaacagaattggctctaaaaaggaggctacaatctgccttctgcttcaaggagctggggaggagcaaaggatgagacaccagggcatggggtgtgggattctctgggagaggcggcttcagatgggcagaggtcagctgaggcaagtgactgctcttccgatgtgctgtccctcctatccctcccgagggtaagaaagggcttgctgtgtttccttggagctcaggggtgctttcagcctctgtggcaaggaagcgtggccaggttgaaaatcaaacatttaataaactgtggggctgggggtggggagaacttgccaagggtggggagcacgaagcctgggcctatggcaggggctggacttgctacattttgggagttcagcacaaggagctttgggtttttgtttttttctgccaagatgcattatagaaccatgaaaaacaatttctcagtgtggcccaaatggtggcctcacagtcttctcctggagactgtcactaaggcgtgagtctcccggcagctgtcagcattcaccatctctgttggtctgtacttctgaagcagtggcctggggatacatgaaaattgattttaaagggaagttgtgagctatgaaaactccaaaccgactctgtattaatcttgtccaggtayacatgacattcacrycctgatccttgggagagctatcaygggaatccagghgttcacggccagcaagtgagccgctccatcaggggcccgaaactctcaagcccctttctggagagatgcctggctggaccgtaggagcgctgtgctctgagcttagaaagggaggtggcggatggagtgggaagtgagagacactgatttttaaatatcaaaatttcccttctgaagtcgttcrgatgtgttccttaaaaagaagatggaattctctgtagagcgtctcaatccacttttaaccatggatgagagcagactccatttaccctgaaatagcagcttctcttgagaggagagtgacatkgaagcaactccgtctgctgcagctgaccccctcacactgagttcacagtgcgccctccctccctcccatctgggggtagtgccttatgctgggtgttggagcagagtgagggagaggaaaataaagacctgcacatctgaccccaaggtgtcaggccggtttactggtaaccacctgagaagtagtttcagccacagaagaaacgaacacgtctgggggctgtgagttgccgggacgtggtggggactttcccctagagtggtctggcccccatctgagtcttaggctctgctgtaaaaaagaaacccaggttagcagtgccggtctgtgccagggctgtgggcagaggggatgatttctgagtggcaggggtgcaagggactttgtcctttctgtcaccacagagctgctcatacaacagtgggacatgacaacggtttggcttctcagctcagacacaccatgttataggggatcacaaacaagatggtgagtgcaccaagggctttgcagggactgtggcctggcggggtcagggctgggtgcctggtttctgttcacatttactcttggctgggccatccctgtcctcttcctcaggcagcgccccccctgtgagtttactcatacctcaggctggagacacaggtctttgtacacagtctccacgctgtggcagacttgtttgagctctgtctccaaatggctgatctttgccattttctgggtgaactcttggagcttttcctggatgatcttgttgtggtcattataaatctgatagatcctctcctctaatttctctgtcagatccgaaacctgttaaacaataagatgtgttctcggaaaatcaaacaagaggtatcacaagacatctgtgttaagtgggtttcttagatttctgcaatttatcttatgaaaatgacaaaataggctgggcacggtggctcatgcctgtaaccccagcactttggtaggccaaggtgggtggattacttgaggccaggagttcaagaccaacctggccaacatggtgaaaacccatctctattaaaaatataaaagctaggacgggtgtggtggctcacgcctgtaatcctaacactttgggaggccgaggcgggcggatcacgaggtcaggagatcgagaccactgtgaaaccccgtctctactaaaaatacaaaaaaatttagccgggcgaggtggcgggcgcctgtagtcccagctacttgggaggctgaggcaggagaatggcgtgaacccgggcggcggagcttgcagtgagctgagatcgcgccactgcactccagcctgggctacagagcaagactccatctcaaaataaataaataaataaataaataaataaataaataaatacacaaatacataaaaactaactgggcatggtggtgtgcacctgtaatcccagctactcgggaggctgagacaggagaattgcttgaacctgggaggtggaggttgcagtgaaccaagatgatgccattgcactctaacctgggcaacaagagcaaaactccgtctcaaaaaaaaaaaaattagcaaggcataggtgacgcgcacttgcagtcccagctactcggaaggctgaggcaggaggatcacttgagcccaggagttggaggctacagtgagtcatgatcacactactgcactccagcctgagagaccctacctcaaaagaagaaaagaaaaacaccaaaaactaaaacccagtgcagtgactgggggtcagattgcctatattttaaatttttttgctttttttgttttgttttcttgcggcggagtttcgctctcattgcccaagctggagttcaatggcatgatcttggctcactgcaacctccgcctcctgggttcaagcgattctcctgcctcagcctcccgagtagctgggattacaggcgagcgccaccacacccagctaactttttgtatttttagtagaaacggggtttcaccatgttagccaggctggtctccaactcctgacctcaggagatccccaccttcagcctcccaaagtgctgggattacaggcatgagccactgcacctggcctgttaaatttttttaagaggcaaaagtatatacagtcgtgtgctgcataatgacattttggtcaatgtcagactgtatatacaatgatggcccataagagtataatgccatatttttactgtaccttttctatgtttatatatatttagatacacaaatacttaccatcatgttataagtgcctacagtattcagtatggtaacatgctgtgtgcaggtttgtagcttaggagcaataggctcttccacgtagcctaggtgtgtagtagactataccatctaggtttgtgtaaattcaatctatgatgttcagatgatgacagtgtcacctagggatgcatgtcacagaactgtacagtacaagctcagccaggttaggaagaaagtacacagaatagaagaggcatccaacaaagtggcctctgggtgctgtatcaaaataaataaataaataaataaatgtttttgtatcttttctactagaggccaaggcagcagggtgaggagttcaagaccagcctgggtaacatagcaagatcccatctctacaaaaaaaatgtttaaagaaaattagctgggcatggtggtgcacacctgtagtctcagctacttaagaggcagaggtgggaggatcatttgagcccaggagtttgaggctccagtgagctgtgatcgtgccactgctctgtaagcctgggcaacagagtgagacgccacctctaaaaatataaataaataaataaaacaagtgagccgggcatgatgttgcatgcctatagtctcaagctactcgagaggctgaggtgagaagattgcttgagcccaggagttcaagattgcagtgacctatgattccaccactgcactgcagtctgggcaacagcaaggcttgtctcaaaaaaaaagaaaaaggaaaataaagtcaatctgtcatcaagacacctagaaccagcaagctgtcccactcatgtgacccattatgtattttgtttgtttgtttgtttgctggaattataggcacgtgctaccatgcctggctaatttttttttttttttcgagacagccaagatcgtgccactctactccagcctgggctgggcaacagagcgagactctgtctcaaaaaaaaaaaaaaaagaaaaagaaaaaaccagaaagaggcagtcttctttttcttctttttttttttttttgagatgaagtcttgctctgtcacccaggctggaatgcagtggcgggatctctgctcactgcaagctccgcctcccgggttcaggccattctcctgcctcagcctcctgagtagctgggactacaggcgcccgccaccacgcccagctaattttttgtatttttagtagagacagggtttcatcatgttaaccaggatggtcttgatctcctgacctcgtgatctgcccgcctcggcctcccaaagtgctgggattacaggcctgagccaccacgcccggccctcttctttttttttttttgagacggagtctcacctgtcaccaggctggagtgcagtggtgcaatctcggctcactgcaacctccgcctcccaggttcaagcaattctgtctcatcctcccgagtagctgggactacaggcgcgcaccaccatgcccagctaatttttgtatttttcatagagacggggtttcaccatgttggccaggatggtctccatctcctgaccttgtgatccccctgcctcagcctcccaaagtgctgggattataggcgtgagccaccacacctggcccctatttatttatttttgagacgaaatcttgctctctagcccaggctgcagtgccgtgcagagccactgcactgagccaatttttttatttttagtagagacgtggtttcaccatgttggccaggctggtctcgaactcctggcctcaagtgatccacctgcctcggccttccaaagtgctgggattacaggcgtgagccactgtgcctggtccccccattatatattctgaagaggcatcaggtgcaaccattcatgtaggacctgaacatcacaccagcttttgcaagatgtaagccctgggcatgtggaagaagctccactcccccgtcacagaccattcgatggcttctgcaggacatatgggtgtgacaatgcaagttgtgcctcaaccccctactcccgtggctgctcgaccttgcgtgaagtaagagggctgcgtgttggaggcaggagggcatccaacgccccgctccctcagcctggctctctcgtcaggcaaatcattcatttccaagccttatytatatcatgggtccaatctcttctctgtaggactattctaagggtaaattgagatacagatggtcccaacttactacagttcaacttactacatttttgacttacagcattttcaactcacaatgggtttattgggacgtagccccatcataagtggaggagctcctgtgctgtgtgtgaatggcctagcaccgtgcctggtgtacaacagacaccatcagtggttcattccctccccttttgcataaggaatcccccctctcgctgggtggagtctgtcaccttggtcttcaggctgttcctgaagttggtcatgagtgcatggtccttttgccggctcttgttgatgttttcgatcagctcctgggctctcttmtgcaggatgtcaatgcttgagtccagagaggagaagtagagtcccgacttcccttccaggaccgtcagctggcaactggcactggaggtggcgacacaagggcaagaaacctgacttctcagagtacaggragcggccaggtgtagtcgctcatgcctgtaatctcagcactttgtaggccgaggtgggcggatcacaaggtcaggagttcgagaccagcctggcaacatggtgaaacctcgtctctagtaaaaacaaaaaaacaaaaaattagccaggcacsgtggcacgtgcctgtagtcccagctacttgggaggctgaggcaggagaattgcttgaacccaggggatgaagttgcagtgagccgagatcacgccactgtactccagcctgggtgacagagcgagactccgtctaaaaaaaaaaaaaggacaggatgctgagatcagcaccagactcttccaagagcggctgatctgagagagatcaggtgggaggggacccgcgttgttgccttccatgggtgacacgaggcatgcttcctaggttattccattcacacacacgccctgaatgatgagaatggcacccccattttatagctgagaaaacagaccaagaggcacgactaaatatgcccaaggttccagaccaaggaggtctgtctgtccccaaagcccactgttattttatgacaccaacttgcttctttggaattttggaataccaataatagtgtcaatgctttctttcttttttttttgagacggagtctcactctgtcgcccaggctggagtgcagtggcgcgatctcggctcactgcaagctccacctcccgggttcatgccattctcctggctcagcctcctgagtagctgggactacaggcgcccgccaccacgtccagctaattttttgtatttttagtagagacggggtttcaccgtgttagccaggatggtctccatctcctgacctcgtgatccgcccgcctcagcctcccaaactgctgggattacaggcgtgagccaccgcgcccagcccaatgctttctttcttattttctttttttttatagagacaggtctttctctgttgcccaggctggagtgcagtggcacaatcatagctcactgcagtgtcagcttcaagtgatcctcccacctcagcctcctgaataggtgggactacaagcatgtgctaccatgcacagctaatttttaaaatttttaaatagagactgggcttcactatgttattcaggctgctctcaaacttctggcctcccaaaatgttgggattacaggcatgagccactgcgcctgactgatgcaatcagcaatctcctgcaacctctgtctcctaggttcaagccattcttctgcctcagcctcccgagtagctggaatta

SEQ ID NO: 93658 - DNA, 23302 bp, Homo sapiens
tgcgatcataatgcaataaattgttgctgggacttattcttttagctccccttccaaaaaaaatcattattaagaaagtcaatggggtctgggtctccctctaactaatgggacagagatcagcaccaggaagcaggccctcaccaaacatgatgttgtattctgagtctccgtgcatgtctgtctggtccaaactattaggaaacagcttcacatagccgcccccacagtcgatgttctgctcatgtttcaccgtgaactgcaccaccagcgtctggcctttgttgctgaaaggctcgaaactggccgacagagcataaaagcgtgcatcctggcttgtctgcaaacctgagacgggacggtagtgaggtcaccgttgggccttgactcgcgaggaccctcgacttagagaatagagaagactcccccacttcctccacctgtcctcctccaaggggactgtcccggctgtgtgtgtacagacaaggacttctgccaggaagtcctcccggatctgagcacccactcctaggctcttacctttatctttctcctcgtcaccgtagaacttgccggaactgagaacgaatttgccaaaatctgacttgtgtttggattcgatccagcgggaagtccacccgtctaagtgggggattagaggggtaggtcagagcggctgtgctaatccccccccacaccaaacatctgccgagagccacaagctgctggggacaggaaaggagatccccgacactccccattccaacctctagtttgacacgtcgggtgccttcagagatcctcgggctaaccctaactcccgccgcgggaggccgctacgccctccgcgctccccagggacgcagaagagaaatcgcccgcggctctagtcccgggaggccaccgtgttggacctctaaacggtaattacgggcgacaacgcagatccaggatcgggggccggccgcgtcgtcggggcggcctcgaggcgggaccaggcgttacctccgtccagaaactgctccttgaagtagacggcaggctcggcgacggccaggccgaggaggccgagcagcagcggcacggatagcagcatggcgggccgagggggcggcaacgcgcgggccctttaaaacgaccctccggcagcggctctgcagtacggacggacgccgccgcccgccttgcacttttatacccacccgcctctcaaaccaacctgacccagcccttgggcccgcccctgccactttgtcattggtctatgcccatggccgtctttttccattggaccttcgtcggttcactakgttaggmtgcgcctcggaacgctgggttcccagatggccgatttctattggcctcaccaccgaccaatgatggtcgaccacgcgtgggggggacgcccactggtggggtgggggccgcgagcacctcaggccaggtcatgtgaccagacctgaacccaaccccgccctcgtccgcgcgcgtcgttgcccatctgggcgtttaaagaaaccgcgggagcgcagctgtctccacgcgggaccgggaccctgccctcagcttctctccctcccattccctctaggtggaggggctgggcaaggctttcttagccagctcttatcttgcatttgagaaccagcaccccactgctgctcccccacccctgcctgggatgggagagagctcacggattggggcccttggggcttcgctgcaccccggtgctacagtcacgcgggccggtgggaagaatgccagccctctcctccttctgcccctagagccctggcagcctatcggactgctgctgtgtgaccggggcaagtcacttaagctctctgaagtgacagacgttcctgagcagacagagggggcgaccctggccagatgctacccagcagaaatgcttttaacgtttttaaagctgtcctgggacaagaggggaggaaggcttaacgatgtgactgtgactcctggagtggggatagggttattacccagattgcagccgcccctttaccctcctctcaaccggtaaatgaagggggtcgctgtctgtggtctcccacaaacggcctggcttttgcaattaaacggctataggcaggcgagagggcagggggttccgtttggggagggaaaaaagacacagatggtagggacgataagatgctagggagatgggcaggacccaccccccgaccccagtctagagtcttcttcagaagccagaggcacgtgactggcaccagtaccctgcccccacgctgtagaaaggaggaaggagagctgggggttttccaaactctgggcaaataagccctggacctgggagcgcgggagtggactatggaaggagggaatgagggggatccaggaaagagggtggggagggggtgcttcctggctaatggttgtgactcagaaaagagaggaaggaaaaaatgaaaaggaaaataaagtggagtggggggaatgacttggcaagggtctctggttaaaaaaaaaaaaaagaaatggtggccgggcgcagtggctcacgcctgtaaacccagcacttggggaggccgaggcgggcagatcattttaggtcagttcgagaccagcctggccaacaaggtgaaaacccatctccactaaaaataaaaataaataaataaataaaaattagccaggcgtggtggcgggtgcctctaatcccagtactcgggaggctgaggtgggagaatcgcttgaacctgggagccagagattgcagtgagccaagatcacgccactccactccagcccaccagcccaggtgacagagcaagactccatctcgaaaaaaagacgggggagaatgaactgggaagttggggttctaccacttcctctaggtagtattcagtattgcctagtctggtcccccccatgaggatcccggggaccatcccaggcctcttgctgacccttcctcctgttcctgtgtcaggcacctgtgggcttggcgcttcctacttgaggttagacactgcctgttttgttcacttcgcatcctccagtgtcacctgcagcacctggcacagaacaggcttaaaaagtacttgctgcatgatagaagagaggaaggaaggactcttgtggaaattaactaaaaacacacggggcacagtggctcacgcctgtaatcccaacactttggcaggccaagatgggaggaatgcttaaggccaggagttcaagaccagcctgggcaacatagcaggaggccatttttacaaaaacattttttttaattgccaggcgtggtggcgcctgcctgtgttcccagctactcagaaggctgaggcaggaggatcacttgagaccaggaggttgacgctgccgtgagctgtgttgttgccactgcacactctagcctgggttacagagcaagaccctgtctcaaaaataaataaaaataagccggacatggtagttcacacttataatcctagcaccttgggaacctgaggcaggcagattgtttgagcccggcagttcaaaaccagcctgggcaacatggtggaacctcattcttacaaaatatatatatgtacacatatgtaatatattatatatgacatataatgcataaatatatgaatagtatgtatattatatatagcatataatatataatatacataacacaaattagcctggcctgctggtacacacctgtagtcccaactactcgggaggctgaggtgagaggattgcttgagcccaggaggtggaggctgcagtcagccaagatcatgccactgcactccagcctgggcaatagagtgagacccactccctaaataaataaataaataatcaacataaaatgggaggagagaagggactttgagaaatgtatccttaatacagaacctcatatagggtcaggatttggggatatgagtaatcccattttacagactcaaataataattgtgatgtaaaaggaataaatgtgttctgcttataagagtgttcgaacatgggccacactcaatttagtaagcagtgtgaatatgtgtgggcatttaattctcacagtaacctgggctccaatcacctccatgtgagcaagaaactgaggcacagaaagactacaccttctggttgaatgacataaataacagatctaggattcttttttttttttttttttttttttgagacagagccttgctctgtcaccgaggctggagtgcagtggtgcgatctctgctcactgcaagctccacctaccaggctcaagtgattctcctgcctcagcttcccgtgtagctgggattacaggcacccccactgcacccagctaatttttgtgtttttagaggagatggggtttcgccatcttggccaagctggtcttgaactcctgacctcaggtgattcacccgcctcagcctcccaaagtgctgggattactgagcctggccagcagatctaggattctaatctacctgtgctgacgtaagtcaccactgcccacatgtgattactgaccatttgaaatgtggttggtccgaactgagatgtgttgtaagtgtaaaatacgcatcagattttgaagatttagtatgaaaaaaagtgcaatttttttttttttgagacggagtttcgccttgtcacccaggctggagtgcaatgacacgatctcggctcaccacaacctctgcctcccaggttcaagcgactctcctgcctcagcctcccaagtagctgagattacaggcatgcgccaccacgccctgctaattttgtatttttagtagagacggggtttctccatgttggtcaggctggtctcaaactcccgacctcaggtgatccacccgcctcggcctcccaaagtgctgggattacagaggtgagccactgtgcccggccgagtgcaaaatattttattagtcatctttttttttgtaagagtcagggtctggctggctgggcgaggtgggtcatgcctctaatgccagcattttgggagaccgatgcaggaggataacctgagcctaggagtttgagaccagcctgggcaacatggccaaaacccatacttaaaaaaaaaaaaaaagctgggtgtggtggcgcgcacctgcagttccagctactcaggagcctaaggttggaggatccttagagcctgggaagtcaaggctgcagtaagccataattgcaccactgcactccagcatgggtgacagagcaagaccctgtctcaaaaaagaaagatgttttgcactgtgtttctataggacagtgctaatctaggccatgcagtatttgcactgacgttactctcagcgcacaggggtgggaggatctggaaggtttataatttatgacttcatttccaccaactctctgtagaaccttgggcaagtcataccaccctctgagcctcagttttctcacatgtgtaatgcggttatatcagtatctacatcataaagttttggggataaatgaaatactacacgtgaagtactcagttctgggctaagtactaccacatacgaggtagtccacacaggttaggtgccaccttgacttactaggtgaattccttttccctctataaaaagggacggtacctacccagccttcctttgaaattttaaaagtagctgacatcgccaaaatgaccatctctggagcccaccacccaccgcctctcctagggcaagagagaataccagaagggcagagggttctgtaacccagagacgggraagtccaaggtcacacagcccgctcgaagtgaggctagataaaactcaaaacagggcggtgcttctgaccttgagataatcaattttacccctctggtcaaccagacgccattgatggagccagggtggaggtgggaactgagtcccatgcaccttttgcggctccgtcgccacactcaagatgacgacacattgagccctgttctacagttagacacattcaagatggcggtacacactccggttccggttccggtggctcagctccccccgcccaccckggcccggacacgctgagcacactggaaggagtcatggcggatggtcaggtggcggaactgctgctccggcggctggaggcgtctgatggcggcctggacagcgccgagttggcggctgagctgggcatggagcaccaggcggtggtgggcgccgtgaagagccttcaggcgctgggcgaggtgagccgggcccgtgatgccggaccgccttgcccttgcacctacagtccccttgccacgggcgctctacgtccaagccaaattccctcaggcctagtttggggtagctgtatatgtgtccactccgggatgtgcgggcgggaagtgggacgagtgagggcccagacgcacggatgttcctcatgcaataaacgtttattgaggcacggtcagcgtgggtagagggtacgatgatggacgaggaagcgcggttgctgccctcacgcaggttgcgacgtaataggaaggtgcttcaagaaccagagtgatgggggaaaacaggggacccagctgtgacagctgacccagccttgggggtcagggagagcggcctggtgcaggtgacggctgagtctgttctctgttgaggaaagtgatagcactttagagatcagtggccgggatcttgggggatggcaggcggcaagggagaccagcatagctgtaattgcaaagcctcttaggtctttacctcatgagggaactgggaagcgatagcaggagctagagccggtcagatgagtgtgctatccacatcacctttgggaagaattggcatggacaggactggaggtgaagggatgaaagaagaagctggcacttccccaagctggagggcatgatgtctggctatgggaaggaagcttgggggaggtggggaaggcgtgggattcaggacaaggcagggggcgcacagatgaagtccagccttctgacttgggcaagtggacagtgacagagtcacaggcgtaggatgctgaggggcccgtgggccacccagaaggctagatccatggggccaggatctgggctgtttatccgtagagctcatgttctgtgccccactttggtctcagcttgtttgtccaatcyattccataatcctggctgatggccatgttattcccattttgcagatgtgacaactgatggtcagtaacataatcagtgtgaatagaagaggccgatgagcccagatttgaaattaggcactcaggctgcagagcccatagtcctcaatgcagaggagagatggcagctgtgttgtgtggggtgacagtgccttgaccaatatgatctgacatttgtatacgtcacagagggttaaataatataaggaggtgaggttcaatctaatgacagtaatagccataaaaataattatagtaattagaatttatgccgggtgcagtggtcacacctgtaatcccagcactttgggagaccaaggcgggtggatcacgaggtcaggagttcaagaccagcctggccaagatgatgaaaccctgtctctactaaaaatacaaaaaaaaattagccaggcgtgttggtgggcacccgtaatcccagctacttgggaggctgaggcagagaattktttgaatcgggaggtggaggttgcagtgagccgagatcgcactccagcctgggcgacagagcgagactccgtctcaaaaaaaaaaaaaaaaaaaatttatgcagtgtttgtcacgtggtaggcactatatattctttctgagtattaatttagctactccttaaaatcatctgaggtagaacccatcacacctttctcttatggatgagaagagtcactgagaggttaagcaactttcctgaggtcacacagtaagtgaagggcagagttgggattagaatgaagtgggagccaggccctgtgcactctacttacccttgttgtccttgtcttcatgactctggacctggaacctcagtttttgtttgtaatgtggacctccagggcccgtctctgacattctgggcactgacatgtgaacatttaaacatggagacaggctgggtatggtggctcatgcccattatgccagcactttgggaggctgaggaaggagaatcacttgaggccaggagtttgagaccagcctggacaacataacaacaccctgtctttaaaaagtaatttaaagggccgggcacggcggctcacgcctgtaatcctagcactttgggaggcggagtcggccgattacgaggtcaggagtttgagaccagcctggccaacatggtgaaaccccatctctactaaaaatacaaaaattagctgggggtggtggtgggcacctgtaatccgagctactcgggaggctgaggcaggagaatcatttgaacccgggaggcagaggttgcagtgaaccgagatcgcaccattgcactctagcctgagcgacagtgcaagactccgtctcaaaaaaaaaaagtaatttaaaaattaaccaggtgtggcggcacatgcctgtagtcccagctactcgggactggcggaaggatcgcttgagcccaggaggtctaggctgcagtgagctatgatcacaccactgcacccagcctagtgacagggtgagaccccctttcaaagaaaacaaaaacaaacaaaaaaatgtggagacatatcagttcacctaatttttcacattaaaatctgtcacaggttcaaaaccgacagaatttgtcttctgccaggtaacatctttagtggtgtactttaccctgggaggtgtaaactatcattattactacccctgtgttacataagggaaatggagacacagcaaggggaagtctttcccttgagaccacttggctgtaaagttgtatagctgggatgtgaacctagctttaagggctgtgctttcaacctgggacccagygctgcagaaagggggtgcctggctctgagcctcacccctgcctggacaccctccccacatttccctctaggtcatcgaggctgaacttcggtccaccaagcactgggagcttactgcggagggcgaggagattgcccgggagggcagccatgaggcccgtgtgtttcgaagcattcccccagagggcctggyccagagcgagcttatggtaggagctgcggggtgaatggggagtgagtgatgggatgaaggtggccctcgtgccccactcactgcagcctctcttttccagcgactgcccagtggcaaagtgggcttcagcaaggccatgtccaacaagtggattcgggtggacaagagtgcggctgacgggccccgggtgttccgagtggtgcgttcctgcgggctggtcagggggcaggtggacgggcacatgggcccctggccctcatacccctcacactccttatcctggcaggtggacagcatggaggatgaggtgmagcggcggctccagctggtccgggggggacaggctgagaagctgggggagaaggagaggagcgagctgaggaagagraagctgttggctgaagtgtgagtgggtgccccctgcaggctcaggcccccaccacctgcgaagcatggtggaggcatggtgggagggagacatcttgcccacaccaagcacaggtgtggccagtttcctcccagctcgcttaatgccatagttgtcaagcctacgtgccttggggtctttgcccatgaggacccttctgctgagaactgttttccctctgatcttcaagataggctcctcatcaagtctctctcctgtgtccccttaaagaggccaccctgacagccctcctctccccttgagttccatgaagcccatcgcccctagtcttcatctttggtgcttgttcatttctttcactgtccttagtgtggtccaaagtttaatgaacacacaccagacaggcytctggaacctagatgggctaggggccgtcctctcacaggacaaatgtcccctttgagcagacacagagtggcagagagaagagactagagctgggatgcctaactgaagttcgggctctgtcacttaactagttttatgaccttggccaagtcacctggcctttgctggtctccgtttccttatctataaaatagcctgggccaagtgtgtggctcacgtgtgtaatcccagctactcaggaggctgaagtgttaggatcacttgaatccatgaattcaaggccagcctgggcaacatagagagacccccatctcaaagaaaaaggggccaggcacgatggctcatgcctgtaatcccagcactttgggaggccgaggcgggcaaatcacctgaggtcaggagttcgagaccagcctggccaacatggtgaaacctcgtctttactgaaaatacaaaacttagccgggtgtggtggcgggtgcctgtaatcccagctactctggaggctgaggcaggagaatcgcttgaatctgggaggtggaggatgcagtgagctgagaccgtgccattgcactctagcctaggcaacaagagcaaaactctgtctcaaaaaaggaaaacaaacaaacaaataaaaaaaactgccctctttccggggcttgtggggagacttttgcagaacagagcctggcacagaataaatctgctagactttccctagtatcatcactcagtcgtgtacttagcaccttgaacagaccctggcacacattaggttctcagtaagtgttgaatgaatcagtgagtgaatacagggagatacagcatggtcacataggaggatttcaggtagtgataaatgtcaggatggaaataaagcagagtgacttggtaggtagcatggggatcctcatcagacgggagatcaaggaagtcctctaggaggagatggcagtggcgtccccttccttcccctggccacaggactctgaagacctactgggtgagcaaaggcagtgcctttagtaccagcatctccaagcaagagacagagctgagcccagagatgatctccaggtagcaggcaaccccagggtcagggcaggtgggagctggggcagggggcaggggcgggcagcccttaccaggcccttgcatcctcccccagtggctcttggcgggaccggcccttcaagccctacaacttcttggcccacggtgtcctccccgacagcggccaccttcacccgctgctcaaggtccgctcccagttccgacagatcttcctggagatggggtgagcacagggctgggggcggtgcctggtgcttctgctgggtacaggcagggcagtcaggctgygtctcccaccaggttcaccgagatgccgactgataacttcattgagagctccttctggaactttgacgccctcttccagccccagcagcacccagcccgtgaccagcacgacaccttcttccttcgaggtgggtcagcccctagggcctccctgagacatgagagacaccaggccacggcggagcctttacaggatgggcatcccatttgatcaaattaggtctagaactgggcatggtggtgtgcacctgtagtccggctatttgggaggccaaggcaggaggattgcatgagcccaggagttcaaatccagctcaggcaacatagggaagaatctacctctaaaaaaattaattgagttaaattaaagtccatccttgttggatgtgtcaagctctgttctcattatgccacctgcagtcttttttttttttttttttttttttgagacagggtctcactctgtcgcccaagctggagtgtgcagtggcaygatcttggctcgctgcaaactttgcctcccaggttcaagcgattctcctgcctcagcctcccgagtagctgggattacaggtgcataccaccatgcccagctaatttttgtatttttagtagagatggagttttgccatgttggccagggtggtctcaaactccagtctgcctcggcctcccaaagtgctgggattacaggcgtgagccaccgcacctggcttttttttttttttttttttttttgagacagtctcattctgtcgcccaagctagagtgcagtggcacgatctcagctcactgcaatttccacctcctgggttcaagcgattctcctgcctcagcctcctgagtagctgggattacaggcacctgccaccacgctcggctaatttttgtgtttttaatagagatggggtttgccatgttggccaggctggtctggaactcctgacctcaagtgatactcccgcctcagcctcccaaagtgctaggattacaggcgtgagcaccacgcctagcccaaaattaatgaatttttgttttgttttgttctcactatgttgcccaggctggtctcaaactcctgatctcaaacagttttgcctcagcctcccaaagtgctgrgattacaggcatgagcccccacaccctgcctgcccccatgtcttctttgggcattccaggccgtgcacacctcagggcctttgcttatgttccgtctttagccaagagctgttttctcccagatcttcaaggcaggctgcagcctcaaatctctgctcacgtgtcaccagagacaggccagcctaacactcccgggctcaccccgagttctacagaagcccttctcccctagtgttcattcttctgtcccatttctttctttcattgcccttagcactgtctgaaatggaatgacttcccacaatggggtggccttcctgaccaagagggcagttgaggtcattgggtgccggcttacctggccagaggagcaacatcattcttgtcattattgtcatagcacccaaaacttactaagcactcatcacatactagccactattctaatcttcctgccaactactggaagcagtactgttacccctttttacaaagaaggaaacttggccagcctcagtgggtataatcccactgtttgggagggcaagggaggaggatcgcttgagcccaggagtttgagaacagcctaagcaacatagaaagacccatctgtacaaataaaattagctgggcatagtagtgcacgcctgtagttgcagctactcgggaggctgaggtgaaggattgcttgagcctgggagtttgaggctgcagtgagctatgattgcatcactgcactgcaggccaagcaacagagcaagactttgtctctttaggccgggcgcggtggctcacgcctgtaatcccagcactttgggaggctgagacgggcggatcgcgaggtcaggagatcaagaccatcctggataacacagtgaaaccccgtctctaccaaaaatacaaaaacaattagccaggcatagtggcgggcgcctgtagtcccagctactcgggaggctgaggcaggagaatggtgtgaaccctggaggcggagctggcagttagccgagatcatgccactgcactccagcctgggtgactgagcgagactccgtctaaaaaaaaaaaaaattttgtccctttaaaaaaaaaaaataggccgggcgcggtggctcacgcctgtaattccagcactttgggaggccacggtgggtggatcgagaccatcctggccaacatggtgaaatcccatctctactaaaaatacaaaaattagctgggcatggtggcgtgtgcctgtagtcccatctattcaggaggctgaggcaggagaatcactcgaacctgggaggcagaggttgcagtgagccgagatcrcgccactgcactccagcctgggcgacagagcgagactccgtctcaaaaaaaaagaaaaaataaaaaggtcgggcgcggtggcatgatcccagcactttgggaggcccaggcaggcggatcacttgaagtcaggagttcgagaccagcctggccaacatggtgaaaccccacgtctaccaaatataaaaaattagctgtgtgtggtggtgcacttctgtaatcccagctacttgggaggctgaggcaggagaattgcttgaacctgggaggaggaggttgcagtgagccaagatcatgccactrcactccagcctgggcaacagagcaagactccatctcaaaatacatacatacatacgtacatacataaataaagcccaggtgcagtggctcatgcctgtaatcccaacactgggaggccgaggtgggtggatcacctgagatcaggagttcgagaccaccctgaccaacatggcgaaaccccatctctactaaaaatacaaaaatttcccgggtgtggtggcaggcacctgtaatcccagctacttgggaggctgaatcaggagaattgcttgaacttgggaggtggaggttgcagtgagccaagattgagccattgtacttcagctgggccaactgaacaagactctgtctcaaaaaaaaagaacccaaaaaagccacacacaaatgagaaaactgaggcacgagaatcacttgaacctgggaggcagaggttgcagtaagcccagattgcaccaccgcactccagcctggacaacagtgagaccctgtctgaaaaaaaaaaaggggtgggaaatgctcgttgactgacctgatgttgctctgtcctgcccagatccagcggaggccctgcagctcccaatggactatgtccagcgggtcaagcggacccactctcagggcggctacggctcacaggggtgaggcaggacttacctggtatggaagggaaggaggctggggacccctgggccattgcatggacttcccaccttccctcctgaaggtacaagtataactggaagctggacgaggcccggaaaaacctactgcgaacccacaccacatcagccagcgcccgtgcgctctaccgccttgcccrgaaggtgcggttggcccaggcgggggccccagtggggagagggtgctgtcaaagggaccttctgacccatacctgggcctggcycggttgtcacccctagaagcccttcactccggtcaagtacttctccatcgaccgcgtattccggaatgagaccctggacgccacgcacctggctgagttccaccagatcgagggcgtggtggcggatcatggtctcaccttgggccacctcatgggcgttctgcgggagttcttcaccaagctgggtgagcaggggggcaggggtgggccatggtggtgaggcagcgggcaggtgtgttgatcaccagcattatcctccaaacccctgctctcctgcccgccccccacttcctgcaggtatcacgcaactccgcttcaagccagcctacaacccatacacagagcccagcatggaggtgttcagctaccaccaaggtcagggtaggccctggtactggggtgggagggaggtctcaggctactatggtttggcctgggtccccccattgccatgcctgtaccccacctcccaagctcaccacctagacccagaacctgtaccagcagtgcccagaaactcaacacgcactgcccgtcttttctgtcctgcctctgcaggcctgaagaagtgggtggaggtcggaaactcgggggtcttccgtccagagatgctgctgcccatggggcttccygagaacgtgtcggtcattgcctggggcctctccctggagcggtaagtgcccaagtggaaactcggggtgtccagctgcctcaaataactctccaggtataggggcctgcgtggtttcagcaccacccattcattcatccaatggacaaaactttcatcgtgagtacaaactgaatgctcagccccgtgctgtgaacatgacagcttatgtccctccctctgaatctggggtcccagtggagcgagaaggatgataactagcaagaccaacaagtacatcaggccaggcgtggtagctcatgcctgtcatcccagtgctgtgggaggccaaggcaggaggatcgcctgagccaggagtttgagatcagcctgggcaatagagcaagtctccgcctctacaaagaataaaaacaggccaggcgyggtggcacatgcctgtaatccaagcactgtgggtggctgargcaggtgcatcacctgaggacaggagttcgaggccagcctggccaacatggcgaaacctcatctctactaaaaatataaaaattagcctggcgtggtagcaggtgcctgtaatcccagctacttaggaggctgaggcaggagaatcgtttgaacccaggaggcagaggttgcagtgagccaagatcatgccactgcactctattctagtctagacaacagagtgtgactctgtctcccgtctctactaaaactacaaaaattagccaggcactgttgcgtgcgtctgtagtcctagtcctaggtactcaggaggctgaggtatgagaatcacttgaacctgggaggcggaggttgcagtgagctgagattacgccactgcactccaccctaggttacagagtgagactctgtttcaaaaaaacaaatgcactcagcaaaagaagacagaagtgtgtaccagggcagtaagtggtatagggagggctaaggcaactacgtggtcagtgaaggcatcatggaggaagaagtgccacctaagcaaaatctagaggtagataaagaggtaaaccatgagagtatctggggaagggtgtcccaggtagtggtcacagtcagttcaaaggcccagaggtgggaatgtgctttttgtattaggagaagagtgaggaggctggtgtggctgaaggcggagggtgagaggtgatagagcagttggcgcagggccctgtgggtcatggggagaacttgaacttttcctctgaagaagatgggagccatggaaatctgagcagaagggtgcacgtgctgacctcatgataaactctgttccctcccccacaagcccaacgatgatcaaatatggcatcaacaatatccgggagctggtgggccacaaggtgaacctgcagatggtgtatgacagtcccctgtgccgcctggatgccgagccgaggccccctcccacacaggaggctgcgtgacatgggccactctaggacaggtcatcctccccgagtccctgctgctgygctcctttgcatccctggccagtgaccttgtatttatgaggcctctgtgaggccagcccccaccttcctctttcccacctgtcccaggaccagaatcccagggacagaggactgggtagcaggttccttctgttgtcctgtgtggtgtgtctactgtgagggtgggccctgaggagacctgtgggccacctattgtctaataaagtgggcagttgcccccatctggtggctttccttaggggtgaggggtcttgttgggtccccctagctcagtgtgccacttgatggtcaaaattctgggtactgggctgggcgaggtggcccgcgtctgtaatcgcagcactttgggaggctgaggcgggcgggtcacgaggccaggcgatcgagaccatcctggctaacagggtgaaaccccgtctctactaaaaatacaaaaaaaaaaaaaaaaagtctgggtactgagccaggcacagtggctcacttctgtaatcccagaacttttgggaggccaaggtgggtgggtcacttgaggtcaggaattcaggagcagcctggccaacgtggtgaaaccccgtctctactaaaaataaaaaaattagggctgggtgcggtggctcatgcctgtaatcccagcactttgggaggccgaggcgtgtggatcacgaggtcaagagattgagaccatcctggccaacatggtgaaaccctgtctactaaaaatacaaaaaattagccgggcgtggtggcgggtgcctgtagtcccagctactcaggaggctgaggcaggagaatggtgtgaacctgggaggcggagcttgcagtgagcggagatcgcaccactgcactccagcctgggcaatagagcaagactccgtctcaaaaaaaaaaaaaaaaaaattaggctgggcgtggtggctcacgcctgtaattccaacactttgggaagctgaggcaggcagatcacttgaggtcaggagttcgagagcagcctggccaacgtggtgaaaacccgtctctactaaaaatacaaaaaaaaagctgggcgtggtggtgagcacctgtagtcccagctacccgggaggctgaggcacgagaatcgtttgaaccaggaggtggaggttgcagtgagccaagattgtgccactgcactacagcctgggtgacagaagaagactctgttccaaaaaaaaaaacaaaaaacaaaaattagccaggcatgatggcaggcacctgtagtgttcccagctatctgggaggctgaggtgggagaatcacttgaacccaggaggtggaggttgtagggagctgagatcacaccactgcactccagtctgggccacagagtgagacctgtcccccaaaaacagaaaacaaaaattagctcagcatagtggctcatgcctgtaatcccaggtactccagagactgaggttgatcacttgagcctgggaggtcgaggctgcaatgagccgtgattacaccactgcactccagcctgggcaacagagtgagaccctgtcgttaaatacatatttatgtgtctaaataaacacaagtaccctggaatcttgccatttccatcaaatctgaactttggctgtgtaggggtgaagagaaagcttccttattgccctctgaagtttcactaaaaattactgagaaaaggcagattaataagagaaaaggaatacgaatgtatttgatcatagtgttacctgacaagccttcagaatgaagatccagagatacaggggaaactgtgtttttgttttgttttgttttgagacggagtctggctctgttccctgggctggagtgtaggggcgatcttggctcacagcagcctcagcttcccaagcagctgggattacaggtgcccgccaccatgcctgattaatgaaaagtgtcttatgcttaggttcagcaaagtttgaacacccaggtagaaatttgattggacaaaaagggtttgtcgtggttcatacttgtaatcctgacactttgggaggctgaggcgggtggatcacttgaggccaggagtttgagaccagcctgagcaacatggaaaaaccccatctctactaaaaatacaaaaattagctgggcatggtgcatctgtaatcccagctacttggttggctgagaatcgcttgaacctgggaggccaaggttgcagcgagttgagatcttgccactgcactccagtgttgcctggacaacagagcaagacaaaaaaagaaaaaaaaaaaaaagccgggggggtcgtctaatactaataggctgagtggggaaacccagcaaggcctgtctgtctagattcttcttggagtctcaggaatgcatgctcagagaggccaagaagaatctagatagataggccttgtgtggggcagaaacttctttgaaacgggggtcttatgacctacagtcaatagggtagatcagataatttcttctttttttgagacagcactttgggagaccaagacgggaggacggcttgagcccaggagttggggatcagcctgggctcagcacagtgagatctcatttctacaggaaaaaaaaatataatttgtgtgtgtgtgtgtgtgtgtgtgtgtgtgtgtgtgtgtgtgtgtatatatacatacaatcttttttttttttttgagacggagctttactctgtcaccccggctggagtgcagtggcatgatctcagctcactgcaacctctgcgtcctgggtttaagcaattctcctgccccagcctcccgagtagctgggactataggcgcccgccaccacgcccggctattttttgtatttttagtagagacagtttcaccatgttggctaggctggtctcgaactcatgacctcaggtgatccacccgcctcggcctcccaaagtgctgggattacaggcgtgagccaccgcgcccggccagaaaaatatttttaaattagaagggcctggtgaatgacactgctactcaggaggccgaggcaggaggatcgcttgaacctgggaggtcgaggctacagtgagctgtgatcgcaccactgcactccagcctgggcgacagaccaagatcttgtctcaaaaaaaaaaaaaaattgttatggagtatattttccaaggcagagtggatgaagttagaagcaccgaataaatacaggactctgagatccgtataacctgggcgccccgtggaacccaggagcctcacaggggcacacaagcgcacccagagcgcgccgtcctgttcccaaggggcgccgactgcgcgcgcagcccgcggaccgcgaaactgctgcttaacggtcggccccgcccagttggccgcgcaagttctcaaagagggcggggccgggagcacgcgtcacaacacactcgtcygcgggagcgcagctggccaggggcggggtcggcgcatgcgcagagggtgcgagcttgaaggcgggaaaatacggaatggagcgacagggagtacgcggcgcttgtttccttctcgcgcgtggggcgggcggacagataggcagggaacggctgcgatcccagccatctccagcggacccgagcccggccgcttgtcctttgccattggggctccctctcatcaggcctggcctcaaatttcctgactgactgaacccggccctgactgacgcactgacgggtctgatttccacacatggcgcgtggccggaacggagtagagaaaggcacaaacacccacgcaccgcacccgtttctttcatttcttttctttttttttttttgagacgaagtatcactctgtcgcccagtctggagtgcagtggcgtgatctcggctcactgcaacctctgcctcccgggttcaagtgattctccttcctcagcctcccgagtagctgggattacaggcacgcaccaccacgtcagctaatttttgtatttttagtagagacggggtttcaccatattgctcaggctgttctcgcactcctgacctcgtgatccgcccgcctccgcctcccaaagtgctgggattacaggcgtgagccaccgcgcccggcctcatctcttttctcctacctcttctcctttctcgaaggactccagccaacacacataccagttaggagcccaggtcctccagttacattcccacagccctgccctcacccggcccctctaggtctggtgtcctggtgtcccctagggacagagtgtcctttcaccccatgcccctgccctcatggcacctgccccagccctgcccgtctttcctgcgggtccccaccgtcccgcagcagcacatcgaggtgaccagggttgaagggtcggcaggagggcgatctgttcactcctcattctccctccttggcctccgtcctgactgtgcttgcaggtgracgtgccccatgtgaaatgcaaagaccaggaaccgcagcccttgggggagagcaaggagcatccgcggtgggaagagaactgcgaggaggaagctggtggagggccagctaggtgaggaagatcccagccctatgggtctacacaggcccctgggtccctctcattcacccttttcttccacaaggctatgccagtgtctgctgctttttttttccctcctaacacagcgtcttgctttgtcaccacgcagtggcatgatcacggctcactgcaacctccacctcccagactcaagtgatcctcccacctcagcctccgaaatggctgggactagaggcgggccagaatgtcgggccaatttattaaaaaatattggccaggtgcagtggttcacacctgtaatcccaacactttgggaggccaaggcgggtggatcacctaaggtcgggagtttgagaccagcctgacaaacatggagaaaccccgtctctactaaaaatacaaaattagctgggcatagtggcacatgcctgtaatcccagctactcaggaggctgaggcaggagaatcgcttgaacccaggaggtggaggttgcagtgagctgagatggcgccattgcactccagcctgggcaaaaagaccgaaacgctgtctcaaaaaaaaaaaaaaaaaaaaaaaaagccaggaatggtggcttatgcctgtaatcctagcactttgggaggccgaggggggtggatcaaaaggtcaagagatggagaccatcctggctaacatgatgaaaccccgtctctactaaaaatacagaagttagctgggtgttgtggtgcacgcctgtagtcccagctactcgggaggctaaggcaggagaatcgcttgaaccccagaggcagaggttgtagtgagccgagatcatgccactgcatgccagcctggcgacagagtgagactccgtctcaaaaaaaagaaaaaagaaaaatttagtaggccgggcacggtggcttacgcctgtaatcccagcactttgggaggccaaggcaggcagatcatgaggtcaggagtttgagactagcctggccaatatggtgaaaccctgtgtctacaaaaattagccaggcatggtgacagacacttgtaatcccagctactcaggaggctgaggcaggagaattgctttaacctgggaggcagagattgcagtaagccaagattgtgccattgcattccagccttggtgacagagcaagactctgtctcaaaaaaaaaaaaaaaaagtatatatatagtagaggctgggcgcagtggctcacgcctgtaatcccagcactttgggaggctggcgctggcagataacttgaggtcaggatttcgagaccagcctggcccacatggtgaaactccgtctctactaaaaacacaaaaatcagccaggcgtggtggtgcatgcatgtagtcctggctattcaggaggccaaggcaggaggatcccttgagcccaggagtttgagaccagcctgggcaacagagggagacatatctctctgaaaaaaaagaaagaaagaaagaaagaaatgagcgtggtgtggtgcggttgcacacacctgtggccctagctacttggaaggctgaggtgggaggaccacttgagcctgggaggtcgaggctgcagtgagacgtgattgcttcactgcactggaagagcaagaccctgtctcaaaaataaataagtgaataatgtgatttcaactggtggcaagtaagtggaatgaagaaacaaaatatagtaaggagcaagtagagtgacagggaccttagagcagttggagaactctgaagaggtca

SEQ ID NO: 93659 - DNA, 18298 bp, Homo sapiens
taccctttctgccttttccaggaaagttaactgagggaagacccccaagtctctccttctttggagacccaatgtctgtttttacccagcacctggaccctcaaaccctgaaccccccaacccttgatatttgacttggctttggacacagggttagtctttaaccccagccccagacaggccaacgtgaagtttgtgccccagaaacagtgcccccccgccgccttgccttgctttgccttatcagaggctgcagccaatcagctaaggacagagaggagccctcgaaggggctatcacagcctcagagttcacgaggcagccgaggaagaggaggcttgaggcccagggtgggcaccagccagccatggccacagccgagaccgccttgccctccatcagcacactgaccgccctgggccccttcccggacacacaggatgacttcctcaaggtggggcctagaaggtggggtctaggtgggctggctggaatccagggccacagtcacagatcttggggtccagacctgcatcttgacctgaaatcaagagacttaaccaggactgaggtacgctcagtccaggagaggagatctcagcttagtctggcagggggtgaggagggtggtctaggggtttgaggttctaagtgtgatctatttcggtaatagaaaacgaaggtagcctgggcaacatggtgaaaccctatctctacaaaaaataccaaaaacattaggccaggcatgggggcgtgtgcctgtagtcccaggtactccgtaggctgatgcaggaggatcattagagcccaggagattaaggatacagtgagctgcaccactgcactccagcctgggcaaaagagtaagaccctatctcaagaaaaaaaaaaaaaaaaaggaacgagatctaggctcacagacaatcttccagatatcagcgggaaatgatgagtgtgtctgggggacatccaaaatttcggaattaatcttgttttgggagacagggaaggagagggatgttctgggggaaaactaagtcaaggctggcatcctctcccccgtcccctgccagttttccatctccagcagctctgctaccccttcccccatccccgagtgtggttccagatagtggaagtcttatctcctgtctccagccagacctgatcggtttctgtccctggagctggggggggagcggggagaggggcggttagaggggcagtgttggggaagtgggacagacagacaggcaaacaagacccctttccaaagcctctgcgtcagagtgtccagcccgcgatgtccctgggcagggcaccccagtgtccaccgaacctcgagctgcctgctccctcccgcagtggtggcgctccgaagaggcgcaggacatgggcccgggtcctcctgaccccacggagccgcccctccacgtgaagtctgaggaccagcccggggaggaagaggacgatgagaggggcgcggacgccacctgggacctggatctcctcctcaccaacttctcgggcccggagcccggtggcgcgccccagacctgcgctctggcgcccagcgaggccyccggggcgcaatatccgccgccgcccgagactctgggcgcatatgctggcggcccggggctggtggctgggcttttgggttcggaggatcactcgggttgggtgcgccctgccctgcgagcccgggctcccgacgccttcgtgggcccagccctggctccagccccggcccccgagcccaaggcgctggcgctgcaaccggtgtacccggggcccggcgccggctcctcgggtggctacytcccgcggaccgggctttcagtgcctgcggcgtcgggcgccccctacgggctactgtccgggtaccccgcgatgtacccggcgcctcagtaccaagggcacttccagctcttccgcgggctccagggacccgcgcccggtcccgccacgtccccctccttcctgagttgtttgggacccgggacggtgggcactggactcggggggactgcagaggatccaggtgtgatagccgagaccgcgccatccaagcgaggccgacgttcgtgggcgcgcaagaggcaggcagcgcacacgtgcgcgcacccgggttgcggcaagagctacaccaagagctcccacctgaaggcgcatctgcgcacgcacacaggtgagggggcggggccccggacatgagaaagggcgcggcgcccgctgtagttacaggggaagaagggttgcagagggcgggacttggacttggctggcctctgagagtgagtgcctccttaaattttgtgccctaggggcctcactttgttcatcctagtcccagcccaggctgagtaaaggggtgtggccagatgcaggggacccggggacatgactgggcagacagtggcgcttatggcttccttgtcccctaggggagaagccatacgcctgcacgtgggaaggctgcggctggagattcgcgcgctcggacgagctgacccgccactaccggaaacacacggggcagcgccccttccgctgccagctctgcccacgtgctttttcgcgctctgaccacctggccttgcacatgaagcgccacctttgagccctgccctggcacttggactctcctagtgactggggatgggacaagaagcctgtttggtggtctcttcacacggacgcgcgtgacacaatgctgggtggttttcccacgaatggaccctctcctggactcgcgttcccaaagatccacccaaatatcaaacacggacccatagacagccctgggggagcctcttacggaaaatccgacaagccttcagccacagggagccacacagagatgtccaaactgtcgtgcaaacccagtgagacagaccgccaaataaacggactcagtggacactcagaccagctcccagatggccctggacagcaggagagggtgtgggatgaggcttcccagagaccctgggtctagaaagcggctcctgaaggtcccttattgtggctgatattaactgtcaatggttatgggtcctataaaaatgcccctcccagataaagcttcagcgttggcctgaatttttgggttttggaggctggaagatggcaggaggctgtaaacctagaggtcatattagagggccttacacaccctcatctcctaaactacagtgacacccctcaactccaacaagcccccttgggcactggaggccttgctgtcctctcttttcccacccagttcaggctacactgtccttgtcttctgccttgaaccctgcggacattgacagcaaacatctccctggatttaagagttcacagcctatgactgcccagggggttcatcttgcccactgtccagatagagccaatttatcgagacagagggattgcaatagagagagtttaatccacatacatccagctaaatgggagatgggagttttattacttgaatcagcctccctgaaaattcagaggctagggttattcaagaacagtttggtgggcaggagggctagggaatgggtgccttgctgcaatcctggagctgtggaaaacagttgctgagtcagcytctgggtggggaccatagagtcgctagtctgggtggagtcatccagttgtcagatatgcaaaaagcctaaaaagacatctaaaaaggccagcgttaggttttgcaatagtcatgttatttgcagaaataactggggaagttgcaaaccttgtgacctccagaataatggctggccatctttgtttttgtttttgagatggagtcttgctcttgcccaggctggagtgcagttgttccatcttggctcactgcaacctctgcctcctgggttcaagtgattctcctgtgtcagcctaccaggtagctaggattacaggcacatgccaccatgccgggctaatttttgtatttttagaagagatggggtttcgaaatgctggccaggctggtttcgaaatcctgacctcaggtaatctgccagcctcggcctctcaaagtgctgggattacaggcgtgaggcaccgcacccggccggaaaaatggctggtcataatttaactactacacctacagtttagcagaattcaggctcctctcatcctcctaacctagtgccctttcattatttctacaaaggcagtttagtttggggaagggctattatcatttaagctataaactaaattcctcccaaaattagcttggggccaggcatggtggctccctctttaatcccagcaatttggcaggctgaggcgggcagatcacttgagcccaggagttcgacaccagcctgagccccaaggtgaaaccccatctctaccaaaaatggtgaaacccagtctctaccaaaaatacaaaaattagctgggcatgtggcgcatgcctgtaatcccagctactcaggaagctgaggcaggaggattgcttgaacctaggaggcggatgttgcagtgagctgagatcacaccactggactccagcctgggcgacagagtgagacaacgtgtcaaaaaaaaaaaaaaagttagcttgaccccactccaggaatgaccaagcaagggcagtttggagattaaaggcaagatggagttggttaggtcagagctctttcactgacataattttctgtcataatttttgcaaaggcagtttcaagccagtactcagattcccatagccctttgccctgccatgatcctttgaggctgaggtgggagaatcacttgaaccccggagttccagagcagcctgggcaacatagtgagaccctcatctctgcaatgaacaattatctgggtgtggtggcacaggcctgtagtaccagctacctgggaagatctcttgagcccagtaggttgaggctgcagtgaactgtgatggagtcactgcattctagcctgggtgagaaaccattatcctgtctcaaaacgacaaaaaacaaacatacagtcacctctttgctagctcaggggatcctggagaaaacgtgcagaatgaaaaaggagagtctgggtggcgtggattacatgcctgtaatcccagcactttgggaggcaagacaggtggatcccttgagctcaggagttcagcctgagccacatggtgaaaccgtgtttcaaaaaaaaaactacaaaaattagctgggcatagtggcatgtgcccgtgatcccagctactcgggaggctgaggtgagaggatcacttgagctggggaggcagaggttgcagtgagccaagattgcgccactgcactccggcctgggcaacagagcgagatattgtccgggaaaaaaaaaaaaaaaaaaggaaggaaaaaaaaaaagaaagaaaaaggggaagatacactggaacacaaatgcttcttaaggggcgcagtggctcacttctgcaatcttggcactttcgggggccgaggctggtggatcacgaggtcaggagttcgagaccagcctagtcaacatggaaaaaccccgtctctactaaaactacaaaaattagccgggcgtggtgtcgggcgcctgtaatcccagctactcgggaggctgaggcaggataatcgctttaatcaggaaggcggaggttgcagtgaaccgagatcgtgccattgcactccagcctgggcgacaagagtgaaactccgtctcaaaaaaaaaaaaaaaaaaaaaaaaaaaaaaagaggaagaacaaaggtcccaagagttggacccaggttgtagggctggaataaaaaataaaatacaaacttgtgcctgatccagaaacccgggcgggagttgggtcagacagaagagcgtgggctgggattagctaccacgaaaaggaacggtggccaggctccaggagacgctggagcgccgggcccgtcgtgggcgtggtctgggcagactcagcgttgccttttgcctctccaaaacgcagcatcgcgtctcgggggaggagtctgtaccctcgtgatgtccccgccccggttcccaggcaagtttagggaagtgaaaggcgccaggtgmcagtcctggcctctgatgtaacccagcgccccgcagtcccgacacagattcctggatctcagccccatagcagctatgatcccgctgctgctggcagcgctgctgtgcgtccccgccggggccctgacctgctacggggactccgggcagcctgtagactggtgagtgcgcagcggggggcctaccatcgccccggggtccggctgcggtcactcaaccgggatggctacctcctcggggaaccctggggtgccttctcttccctctctcctatttctgtgcattctccgacctccaggttcgtggtctacaagctgccagctcttakagggtccggggaggcggcgcagagagggctgcagtacaagtatctggacgagagctccggaggctggcgggacggcagggcactcatcaacagcccggagggggccgtgggccgaagcctgcagccgctgtaccggagcaacaccagccaggtgaagggggccccgggccaactaggggcgaaactctagggctgccctgcctgggaggaatttcacgttgcctccgtttatccgcccgcagctcgccttcctgctctacaatgaccaaccgcctcaacccagcaaggctcaggactcttccatgcgtgggcacacgaagggtgaggcctggattgggggctggggagagactcgggtcccatttttccaaggtaacccctgacgtgcatggggtggtcggggagatctgcactgtcagaccctgggcatctattccccccaacttttttttttctttgtttttgagacggtgggagttcgctctgtcacccaagctggagtgcagtggcacaatcttggctcactgcaatctctgcctctggggttgaagcaattctcctgtctcagcctcccaagtagctggtattaaaggcgcaccatcacaccaggctaattttcatatttttagtacagacgaggtttcaccatgttggccaggctggtctcgaactcctggtttctacctcaagtgatctacccgccttggcctcccaaagtgctgggattacaggaatgagccaccctgcccagccgagttcctatgcatttttccaagctaacccctgacctccatagtggggtgggagatctcccctgtcagaccttgggcatctatttcccctattttattttcttttagacaaggtctcacccagtcacctaggctggagtgcagtatcacagctcactgcagccttgacctcccagggctcaggtgatcctcctacctcagcctcccaagtactgggcctgccggtaccccccaccacgcctggcttttttttttttttttttttttgcggcactctctctccatcacccaggctggagttcggtggtgcaatctcagctcactgcaatctccatctccccagttcaagcgattcttctgcctcagcctctggagtagctgggattacaggtgtgcgccaccatgcccagmtaaatgttgtatgttttagtagagatggggttttaccaggttggacaggctgatattgaactcctgacctcaggtgatccacctgccttggcctcccaaagtgctgggattacaggcgtgagccaccacacctggcctactttttgtatttttgtagagtgggcttttgccatgttgcctaggctggtctctaagtcctggttcaagcaatccacccaccttggcctcttaatgtgctgcgattaccggcatgagccgccacacctggcctgtttccctaccttacattactcttggcgttattctggactataagaatttatgcctgcaaaaactgagctcagctgtggttctaacactgctggcaccctctctaagccccgctgcaaactgagggtgttcctgattgcagatgagcttgctgggaggcctggagcaataccctctaattgcctttttttttttttttttttttgagaaggagttttgctcttgctacccaggctggagtgcaatggtgcaatctcggctcactgcaacctccgcctcctgggttcaagtgattctcctgcatcagcctcccgagtagctgggattacaggcatgcaccaccatgcccggctaatgttgtatttttagtagtgatgaggtttctccatgttggccaggctggtcttgaactcccgacctcaggtgatccgccctcctcggcttcccaaagtgctgggattacactgcgtggggcctgccttctttttttaaatttttatttatttatttatttatttatttahttacttacttacttacttatgtttgagatgaaattttgctctgtggcccaggctggagtgcagtggtggatctcagctcactgcaacctccacctcctgggttcaagcgattctcctgcctcagcctcctgagtmgctgggattacaggcgtccaccaccacgctcagctaatttttgtatttttagtagagatggggtttcgccatgttggccaggctgatttctaactcctgacctcaggtgatctgtgtgtctcggtctcccaaagtgctgggattacaggcgtgagccactgcgcccgacctcccctaatgccttcttttggtccaggtgtcctgctccttgaccacgatgggggcttctggctggtccacagtgtacctaacttccctccaccggcctcctctgctgcatacagytggcctcatagcgcctgtacctacgggcagaccctgctctgtgtgtcttttcccttcgctcagttctcgaagatgggtaagtcgagtcagggacacaggatgagtcctgggtttactgaccagaacctggaacgatcttgcatttcctcctccccttgtcctccaggcaagcagctgacctacacctacccctgggtctataactaccagctggaagggatctttgcccaggaattccccgacttggagaatgtggtcaagggccaccacgttagccaagaaccctggaacagcagcatcacactcacatcccaggccggggctgttttccagagctttgccaagttcagcaaatttggagatggtgagtctcaaggttgagggttggagagctccttctctgcagacagggtgactggtgtggccatggctgagttcaagtcagcggtagagaccaggtctgtttgggagctataatcacatgatcagtgaacagacctgggttcaaaccctgggttttgctgtgtgatgtataacttcacctgagccttggtctactcatctgaaaaatggggatactgacatctacttaaaaaattgtgaatgaagtggtacctgtaagtcatttgggtgccagaggtggtgcctcactcctgtaatcccagttacttaggaggctgaggcaggaggatcatttgaagacaggcatccaagacaagcctgggaaacatagcaagacctcatctctacaaaattaaaaattagccaagcaacttgggaggctgaggcaggaggataaattgagcccagagtttcagactgcagtgagctataatgactccactgcactccagcctgggtgacagagcaagaccctgtctttatttaaaaataaataaataggctgggcacagtggctcatgcctgtaatcccagcactttgggaggctgaggtgggcagatcacgagctcaggagatcgagaccatcctggctaacacggtgaaaccctgtctctactaaaagtgcaaaaattagccaggcatggtggcgggcacctgtagtcccagttactcgggaggctgaggcaggagaatggcgtgaacccggaaggtggagcttgcagtgagtcragatagtgccactgcactccagcctgggtgacagagtgagactgtgtctcaaaataaataaataaataaataaatacaaataaataggccaggcacagtggctcacacctgtaatcccagtcgaggcaggaggattgcttgagcccaggagtttgagaccagcctgggcaacacagcgggaccccatctctacaaaaaaaattttaattagtggggcatagtggcacacacgtgtagtccccactactcaggaggctgaggtgggagaacagcttgagcccaggaggtcgaggctgcaagtgagtcatgatcctgccactgcactccagctggggtgtcaaaatgagacccagtctcaaaataaataagttaattaattaaaaacactcagggccggacgcggtggctcacctgtaatccccacattttgggagaccaaggcgggtgggtcacttgagcccaggagttcaagaccagtctggccaacatggtgaaactccatctctactaaaagtacaaaaattatctgggcatggtggagggcgcyggctgattacacggtcaggagtttgagaacagcctggccaacatggtggaaccccatctctactaaaagtacaaaaattagccgggtgtggtggcgggcacctgtaatcccagctactcaggaggctgaggcatgagaatcgcttgaaaccaggaggcagaggttgcagtgtgccgagattacaccactgcactccagcctgggcgacagagtgagactctgtctcaaaaacaaatttgggaagggcaattaatattaatgtcatcattcccaggrctgggaattgacaactgagctcagaaatatggaaactgtggcagggcgcggtgacacacacctgtagtcccagcattttggaagaccgaggtgggcggattgcttgagatcaggagtttgagaccagcctggtcaatatggtgaaacccctctttattaaaaaattagccgggtatggttgtgcatgcctgtagtcccagctactcagaaggctgaggcaggagaatcacttgaacctcggaggcagaggttgcaatgagcctagattgcaccaatgcactctagcctgggcgacagagcaagactccatgtcaaaaaaaaaaaaaaaaaaggaaatatggaaactgagctgagagaggggaagtggactagggactccctcgcagtggccctgaccctacctgtgccctctctccatcctttgcagacctgtactccggctggttggcagcagcccttggtaccaacctgcaggtccagttctggcacaaaactgtaggcatcctgccctctaactgctcggatatctggcaggttctgaatgtgaaccagatagctttccctggaccagccggcccaagcttcaacagcacagaggaccactccaaatggtgcrtgtccccaaaagggccctggacctgcgtgggtgacatgaatckgaaccagggagaggagcaacggggtgggggcacactgtgtgcccagctgccagccctctggaaagccttcyagccgctggtgaagaactaccagccctgtaatggcatggccaggaagcccagcagagcttataagatctaacccttatggccaggtgcagtggctcacgtatgtaatcccagcactttgggaagccaaggagggaggatcacttgaactcaggaattcgagaccagcctgggctacatagtgagaccacrtctctactagaacttaaaaaaagttagccaggcacggtgataaatgcctgtagtcccagccactgaagccagaggatcgattgaaccagggagatcatggtcacagtgaactatgattacgccaacctgggtcacatagcaagactctgtttcaaaaaaaaaggkggggcgggggacgggtgggtgcagtggctcacatctgtaaccccagcactttgggaggctgagatgggcakatcacttgaggtcaggagttcgagaccagcctggccaacatggtgaaaccccatatccattaaaaatatttaaaaattagccagacatggtggcacgcgtctgtggtcctagctcctcgggaggctgaggcaggagaatcgcttgaactcgggaggcagaggttgtcatgagctgagctaacaccacggcacttcagcctgggtgacagaatgagactctgtgtcaaaaaaataaaaaataaaaaatctaagggctcaggaaccagtttggacttgattttgaatcccagttcatccccttcctagctgtatgaccttgattgtgtgccttaaccgctctgtgacacagtctacctgtctgcaaaatgggaaacataatacctgccatcaggattgttgaggagtaaataaatggaaattggtggacgaggctgttaaccttctcttcaggtgggcgctgggacacaagagcatcgcagcttcaattctccccctaaaggtttgggggcagttggtgcagaggtgagaccagaagtgggaccacaggaggtgtctatccaaaattccctccactctccatggtaaccagaactggagtcccacctcccaaaaagcacctgggcatgggggtggggtcgtgtgatgtctcgccttgcctggagaggagtgagccccagaaaactcacgcagcacggacgcactttatttatatgtgtacatatgtatacggaggctgtacagcgcggggccgatgacccccttggctatggtcccgggggtgcgggactggacactccttttttggtcaggcctgctgggggcacagcttcagcagggcaccgggaggtcagccccacttgaggcttggtgccygagcccaagagggatgcgggtgggactggggtcactgcactgctgggtgcactgcayttcgctggggctagggagggtgtctggggctccggggagagctttggggaggcgggcttggagcgaggaccgctcakcgtggtgcgctcctccaccacctccaacacccagcgctcccggccccggggggcctcgggcacrgaaggcgccaggggtgcgggttcctgcaaccccttggagtccgcgcccagaggctgaggcaccacagccttagccccgggccgcgcaggctctacgacaatgggtaccaggggtgtgcccgcctcgccagagctgctgcgccggcctgtctcgtgttcctgcaccgggctcagcgccgccttggccacagccctggccatcccgccagtgccatcctccgtctgcacgctctgatgccgcgtgcagccgacgtcccgctccagggtccggccaccgggggtcgtcgcgcggggtggggtgcacgcctcggcgccccccggggattccttctccttgctcgacactggtggcctggaggcaccctcgggcagcaacgggtccgcgcccaggctcaaaggtgactcctgtcggcccaggcggcggacggcgacctgccggggcgcgccaaggccctcgactgggggcgtctcaccgtcggactcggcaaggctatgcagcgccagctcgccatggaagtccttgcggaaatccgggtggcccacctcgaggctgtgtttgcgcagcgcgcccttcttgtccgcactcaaagaggctcccagcttctcggccgactgcacgcgcttgaggagcggcgagcgagggggctcggcactcttggggcgcgggcgcacgacgggaggcgatgagtgcagtttggccgggaagctctgagtagtgtgcgagctgcccaccgtgtggcccggcagtggcggcggtgacgcctgcgtgggggacggcgtgtgtgccagcggcgatagagggatgttgccggccgacttgcatcgcgcagagcggtactggcgatggagctttggcgacagtccgtgcagcgtgctgggccgaatgtggtgcgaygccgacgacgcaggcgagttgggcgtgctcgaggctggggagctgctctgggatgaggcgcctgcgggagacaggaggtgaagcgagtgagtacagcccaagcaccagccaggccaccccgcgctgctcggtccccgcgcaggtgcaggaggtaatacctaggtaggcggagtcaggcgtggagcggtagctgtgcgtgggcgagcgcgccggcagcccgtgcgtaggcgagcccgggagactatcgctggatgacagcgagcggttcagcgacgacagcgagcggctagtatgcagcaggttcgactgcttcgtgatcttccggaagagggagctgcgcttcttgctgcgggacagggagggggccaagcgtccttgacctggacgccagagctcagggctcctcccatttcacggcctcacaacggtaaccacccaccccttctggcccttccctctccagctacaacccacctatcaagataaagaacttcctttagctcagtgctgcttggctcctcccacttcagtccccacccaccccctttggccactcctagtccaagctagaaacaagcatccaaacaaaaccaacctgttctgccccgcccacctctctagctcctccctcttccactacaatccacctatcaagatagaacttcctttagctcctcctacttcaggccccgcccaactttaggccactcccaattctggctacaaacactcatccaaacaaaaccatttttttttttttttttgagacgaagtttcgctcttgtcgcccaggctggagtgcaatggcacgatctcggctcactgcaacctctacctcccgggttcaagcgattaccgtgcttcagcttcgtgagtagcctcctgagtaggtgggactacaggagtgagccaccactcccagctaatttttgtatttttagtagagatggggtttcaccatgttggtcaggctggtctcaaactcctgacctcaggtgatccacccacctcggcctcccaaagtgctgggattacaggtgtgaaccacctcgcccggccaaaaacaacctcttctagtcctgcccacccctctagtccctccgtctttcactacaacccacctatcaagacagaacttcccttaactcagtgctgcttggctcctccctcctcccacttcaggtcctgcccaaccttttggccactcccagtccaggctagaaacacatccaaacaaaaccaacttggtcccacctgcctctagtcccgcctcttccactacaacccacctataagagtgggaagaaatgtacttatctcaaccccgtctggctcctctcacccaaatccctgtacttgtctgggccaaactcactgatcaaaacagaatactaaaaacaaacaaacaaacagaatacccttctggccccacccacctcccacctagctcctcctatctataagggaaaataggatttcagttggctgaaccttgcctggcatgctcattccagatagacatttcttattctagcctttcccagttctgtctaaacacatctaacaggataggaccatctcctggaccccctccgtctctggacatctccctttccagttcacatctcctgggcctgcctatatgtgcaagaccctcctacaatgcttttctctgatcctagaaatttggcacagcttccattcttggctccttccacttttacagcccctcttttttttttttttttttttttttgaaagagtctagctctgttgtcacagctggactgcagtggtgagatcatagctcactgcagcctcgacctcccaggctcaagcaatcctcccacttcagcctccgagtagctgagaccacaggtgtgtgccaccaaacccaactagttttttaagttttttgtagagatggggtctctctatgttgcccctaatcttgactcctgggctcaagtgatccttctgcctcagcctcccaaagtgctgtgattacaggtgtgactcatcccagcccctctttttttgtttgtttgtttgtttgtttgtttgagatggagtctcactctgttgcccaggttggagtgcagtggcacaatcttggctcactgcaacatccacctcccgggttcaagggattcttctgcctcagcttcctaagtagctgggactgcaggcgagcgccaccatgccaggctaatttttgtatttttagtagagatggggtttcaccatattggccaggctggtctcaaactcctgacctcgtgatctgcccgcctcggcctcccaaagtgctggggttacaggcgtgagccaccgcgcccagcccgcagcccctcttaattgtcctcttccctttgcttgttggtcatttgttcccgccacctttcccgtgctcttcccttctccatcctcatctgtgcccctcccgcctaagttccacccactgctcaaagaccaggctgtttacggctgtgcccacctctcctggccctccttggcggagggtcgcttgttcctccgagccattttagccttgtagctgctgcgccttgcgggaccaatgcggatagaggtattttcgaagggcgttgtggtcactgmtaccttgttgccactctgggggaagaatgcgggaaaatgctctgctaggggctgctcaggcctcccccaccctccgcccagggtgcctccttccctgcactcaccttaaggatcagctccacgacctcaggatgcaccatgccatgcacaggctccccattcacgtgggtgatgaggtccccagcacagagtcctgcctcctgggctgggcctccttcctccacatgctgggaaaagagcaccccatagggacagggttagtgggattggtaacaaggaaagctcctaaacttatatgcaggacacttagctctgcatgcattagaatcctcataacaccttgtgaaatagttattattcctccccccacattttttttttttttttggacggagtctcactctgtcacccaggctggagtgctgtggcgcaatcctggctcactgcaacaacacccgcctcccaggttcaagcgattctcctccctcagcctcccaagtagctgggattataggcatgcgccactacctccggctaattttttttttttttttttttgagacggagtctctcgctctgtcacccaggctggagtgcagtggcgcgatgtcggctcactgcaagctccgcctcccgggttcacgcgattatcctgtctcagcctcctgagtagctgggattacaggcatctgccaccacgcctggctaattttttttgtatttttagtagagatggggtttcaccatgttggtcaggctgatctcaaactcctaacctcgtgatccacccacctcggcctcccaaagtgccgggattacaggcgtgagccaccgcgcctggccattttttttttttttttttttttttttgagatggtgtcttgctctgtcgcccaggctaaagtgcagtggcgcaatctcggctcactgcaagctccgcctcccgggttcaagcgattctcctgcctcagcctcccaagtagctgggactacaggcgcccaccaccatgcccagctaattttttgtatttttagtagagagggggtttcaccatgttagccaggatggtctcgatctcctgacctcatgatccaccctcctcggcctcccaaagtgccgggattacagccaccgcgctcggcccaatttttgtatttttaatagagacagggtttcaccatattggccaggctagtctcaaactcctgacctccagtgatctgcccacctcagcctcccaaagtgctgggattacaggcctgagccactgcgcctggcctattctccccattttgcagatgaagaaacagtctcggccaggcaccgtggctcacgcctgtaatcccagcagtttgagaggccgaggtgggtgaatcacgaggtcaagagattgagaccatcctagccaacatggtgaaaccccgtctctactaaaaatacaaaaattagctgggcgtggtggcgcgcgcctgtctgtagtcccagctactcagaaggttgaggcaggagaatggcttgaactcaggaggcagaggttgcagtgagccgagatcctgccactgcactccggcctggcgacacagtgagtctccgcctaaaataaaaaagtaaaagaaaaaagaaacaggtttagagagggaagaggcatagagggtcacagaggtgtctcacccaggctaactggtttgagctggaggggccttttccccaccaccctccactctgtgatggagactccacccatgagtactcacccagacaatgtggtggacactatagacatccgtgtcacccatgtagacacggatggcacgcagtgtgaagccatacttcttgcccg

SEQ ID NO: 93660 - DNA, 17103 bp, Homo sapiens
gggtcttgctctgttgcccgggttggagtgcaatggcacaatcttggctcactgcaacttctgcctcctgggttcaagcgattctcctgtctcagcctcctgagtagctaggattacaggcgcctgccaccacgtccagctaatttttgtatttttagtagagacggggtttcaccatgttggtcaggctggtctcgaactcttgacctccggtgatctacccgccgcggcttcccaaagtgctgcgattataggcgtgagccactgcgccctgcctccatttttgagttggggggcttcctttgtcacccaggatggagtgctgtggcatgatcatggctcactgcagtctcgaactcctgttttgtccccattttatcctgagatgaccaaatggggacaacttacagttaactcacctgggtgacgttcacgccctggtccaatgcatactgtataagcccagtggctgtatcatgtgacagggagttcaggttgtatttgaccctgtggtggggaacagagcccagttaatctcattctaggaacaaagcttggtcagcccatgctggctgcccctcccggggacccctcaccgcccaagcatgctggtagagatgaggtttggagacagcacatccagcgcccagccgacaaagtccgtgtcctccattttcgcaaacagcctttcccgctcgctctccaatagggtctttgagtctgggaggaggtttggaagagaaggggaacagctggttctcccagttcctgccctcccctttcagttctcacctgcccctgcacatacccaggaatcccttccccagacgcacacctcgggctcacctgccactttcagcgcctccagatctgccaggcgaggcaggggacaataacagatggcgtagaccatggggcctggggagaaggggtgtcagttttctggcagccggggtccaatcactgagcccgtgaaagttgccattcatccctgttctatcatcactgcttctttaggtgccatcaccacgaccacatcccctcccttggtgcagtgcaatcccgactcccgtttcccgcatcctccgtaccacgcccctcccctccctggccctaggggcgcacccagcacggggcccctgcccgcctcatcgacgcccaggacgcaaggctccttgcggcacaccgcgggcacaggcgaactcaggcgacagcggcctgtattgtctctctccagctcgctgagatccatgccgcctcagccgccaccaccagctgcaagaactaatactgcaggagcgggtctcggcgcgcgttttccgcgggcctcgaagcggcgcctgcttccggccaatccgcgggcagaacacgcccctggcgctcccgccgccgtggacgcttacgcagccgacgccgacgtcgctgccgtgcgccctcctgggaattgtagtcccgaagggctatggccgaacactcagcttggggaattcggtggacggggtcactttgcaagctctgcttcacggtctctggggccccgcctgcgtggcccggtgggaagagggggaaataagagggaaactgagacgtagcttcgaagacccagcctaacggggaactagagagtcaaatatcaccccactcccaggacacgggtcaccgcatcactgggtccccaactgccacttggattcaggccctgtacttgcggtccctgcttctgtacacattctaagtcccctggaccaggtagccccgcttccactaaacccaggcttttggatttggagtccccaaactccctctcttggttgctcccttcggcccacctccactccgtgcaagatctgtgcttcctaacctctgtctcattcaggccaagccttccccacccccgttggagatcacagacctcggtggactcctgctcagggtctctgctccctatagaagctcattcctcccaacttagaatgaatgtccccacccccacccctcgacccactttttttttttcttttttttttttttgagacagagtctcgctcttgtcgcccaggctggagtgcaatggcgccatctccgctcactgcaagctccgcgtcccgggttcacgccattctcctgcctcagtctcccgaatagctgggactacaggcgcccgccaccacacccggctaattttttgtactttttagtagagatggggtttcaccgtgttagccaggttggtctcgatttcctgaccttgtgatccgcccgcctcggcctcccaaagtgttgggattgcaggcgtgagccaccgcacccggccttcttttttttttagacagggtctctctctgttgtccaggctggagtgcagtggcgcgatcttggctcactgcaacctccacctcctgggctgacgcgatcctcccacctcagtctcccaagcagctggactacaggtgcacaccacaccaccatgcccgactatttttggtattttttgtagagacggggtctcattatgttgcccaggctggcttcaaactcctgggctcaagcgatccggtcgcctcagcctcccaaagtgttgggattacaagcctgagccagccacagtgcctggcatccaccacttctattccctgggctcactggggctcatgtcctctgcctgtgggttcccgccccttaccaggctcatgccccttcctcagggtcctagttcattgtctctttatctccttttactcctcttcgcctccccctccacttttttttttttttttttttttttttttttttgagacaggatgttactctgttgcccaggctggatagcagtgtagcgatctcggcttattgtaacctttgcctcccaggctcaagcgatccttcctccccatcgtaccgagtagctgggaccacaggcatgtgccgccacgctcatctaacttaaatgtttttgtttgtttgtttgtttgtttggttttttttgagacagagtctcgctctgtcgcccaggctggagtgcagtggcgcgatctcggctcactgcaggctccgcctcccgggttcatgccattctcctgcctcagcctcccgagtagctgggactacaggcgcccgccaccgcgcccagctaattttttatatttttagtagagacggggtttcaccgttttagccaggatggtctcgatctcctgaccttgtgatccgcctgccttggcctcccaaagtgctgggattgcgggcgtgagccaccgcgcccggcctaattttaaaaatttttatggagaggtgatctcaacgatattgcccagactaatcttgaactccaggactcaagagatccgcctgcctcggcctcccaaaatgctggaattacaggcgtgagccccggcgcccggcgccccctccacttttctccttttctccctagatatcagcggggctcacggctcctgactcagcttccccctaaccaaatcagcctcaagtcactcaagacttggagccccagttctcccttcctcaaactcgcttcatacccgccccgcaccgcacatcctccctccgcgcccaccctgggccccgcaacttgccccggccctgctctctcacccgggctcagagcctccagtcgcagtcgaagggcttgcaggatggacaatcccgttgccggcagggccgtaactggatcagcttctccgggtccatgaaaaccgggcccggcgctgtgcccactacctcgcggctgcgctcctgcttgcccaggtcgcagagacaccgccactttccccacgggccaaggattgagtcctcgacttctagagaaggagggcagaggtgaagacctacgtggagggggcctactcccaatcccctcccccagagagggagaaagataaagatactaacgaataagagaagcacatattcgctagactctgcttctatgccagacaccctgccacagattatctcatttaagctttttttttttttttttttttttttttgagacagggtctcgctctgtcgcccaggctggagtgcagtggcgcagtcacagctcactgcagcctcaacctcctgggctcaagcaatcctcctacctcggcctaccaagtagctgggactacaggcacatgccactgtgcctggctaattttttgtattttttgcagagacggtgtttcaccatgttgcccaggctggtctggaactcctgggctcaagtgatactcccatctcagcctcccaaagtgctgggattacaggtgtgagccagccaccatgcctggcctcatttaatatttccacgagtctcaggtggggaaaccaagacccagagacagcaagccaaccttccaagctcatatacggggtaagtgggccagaggaactacaacctgacacttccaggctgtgccagcctgcccagttgtgagtgtcctacaacatccttggtgcccgccatttgaagctgacttctgtcttcaggggtgtgaccatggccctacctagaaggcacaatgccacctgacagcagggttgtcaagtgataaatggcataattgacataatgaaggtaagtaaatctcccggtgctgtgctagcatatacaaaccaatttattatgatcagtttgtttatttatttaatttatttattttgagacaagatcttgctctgttacccaggttggaatgcaagggcataatcatggctcactgcagcttcaaactccttggcacaaatggtcctcctgtatcagcctcttgagtagctgggactacaggcgcatgccaccatggcaggctaatttattttttatttttatttatttatttatttttgtagagtagggggtctctccatgttgcccaggctggtcttgaattcctgggctcaagcagtcctcccgcctcggcctcccaaagtgctgggccatcaagtcaggctaattttaaaatattttttgtagagatggagtcttgctgtgtgggccaggctggtctggtctccgagaccaagggatcctcccacctcagcctcccaaagtgctaggattataggcgtgagctaccgcgccggccactgtgatcactttaaagggctctttactgaatctgcccctttcccctatgagacagatcttatcccaactccgatcttatcccaactcaccgctcaccaaggtctgacacctcctaccctcccacacccatgtctctgccacacctcaccgacctctttccatttctccttcaggacttttcaccttggcatttgctattccctcttccttggacattctttccccaaatctttccatatgggactttcgcttgtcgttctcgctgcactggtcacgggtcttctgcaatcggaccctctctgatttcccaagcttgcccgcccccttctttctctgtctctgcccttcctggcacctatccccgagtgacagcttcagtgtcctgcccacaccctctcttcccctgggagctgctttaaagcagtatctatttcaatatatccaagagtaaaccgagccttagagaaaagtaaccagcccaaggggacgcctccagtgcggagctgggtggagatttgcagcccgccgaggaaggtccctttgcagccagcaggagaagtagggcaacggggagcctttgggcatcgtcatccccgccgcctgaggttaccctttagatgctgcagcctcagctgctcccagctgtcaccttcgccctgctgccctaagtactgatagtcctggtagaccagggcaggggtcgccagctgcaggagtagcagaggcgccagcagcagcgcccccggggtccgcgccatgctggactccaacggcccccaacgcgctcccaggcggagtcgtgcgcggagtctgcggcgggcgcattacccacgcgggcaggtgcagtggtcccggccgaaggcaacgcgtctccccccgccgcccgcaggcgcatggacccggccgcacgctccccygcacctgcgggcgcagtggacccgaccgctccgctcgtccgctccctcccccgcgccgtgcacgtcttggttcgggccgggcataaaaggcttcgcggcccagggctcacttggcgctgagaacgcgggtccacgcgtgtgatcgtccgtgcgtctagcctttgcccacgcaggtatgaacacccggagtgcacctggcgggaggacccccttcaggctgctttggcccgatcctgactttagtgctggccgcctttgctttccatccgctatagtggcctcctttgtccttgcgggggaaaccgaggccacagccttgcagcgcaggcctgatcgcccgacttcccgccccctgctcgtgcgggcctcactgtctccttctgggctgggggcttgcgacaccgccctccggccgactcgctcgtggggtgctggtggcagtggctgggtcactcgtgctctggtcaggagagcgggtctccggcagcctccgggcctcgtagaccgggtacccgggagggtgagggttagtgctgtcgcctccgccgtgctgactcagtcatagggcccagcacgcagcgcgaccttgggttgggaggacaaagtgtcttcccgggcgcactgaccgggcgggggtctcagctttcagtcatggcctccggtaacgcgcgcatcggaaagccagcccctgacttcaagkccacagcggtggttgatggcgccttcaaagaggtgaagctgtcggactacaaaggtgagcgccgcccggagggggcccaggtagaagcggggccgtgcatragagaagctgggccctaactcctctgtgtccctcctccccagggaagtacgtggtcctctttttctaccctctggacttcacttttgtgtgccccaccgagatcatcgcgttcagcaaccgtgcagaggacttccgcaagctgggctgtgaagtgctgggcgtctcggtggactctcagttcacccacctggcttggtatgagcaggggccaaagagggaggttgcagctaagctcacaccctcaggtcctagcagtgtggcttcgtggccattgctcaacctctggaacctgcgtttccccatcgtgaaaataatggaaacattgccgcccaagtctttaaggatgatgacagtaattagcatttgacaactagttgcctggtatatagagttgcagatgcaactcagakgcaactctatctactctatgtacttagttcccaggagggaggctgtgctgccctatttcatgaagatggaaactccagttcaccgaagtgaagggctgtaccccatgacacagctagaggaggatggggactcttaacacaggctctctgctgggtgatgctgcaagttacaagyacatgtgaagccacttagctggagctgtgcctctcaaactcagtcttcccagccatggggatacagtccttgcacccaacccagggtggggtgggtgaggctcccagcggcctactctaaagccccttatctccggcctccagtgcttatcacattgggcccacagggtgaggaccctgctgtgccaggcatcctgaggccccaactctgtctcccctactcccaggatcaacaccccccggaaagagggaggcttgggccccytgaacatccccctgcttgctgacgtgaccagacgcttgtctgaggattacggcgtgctgaaaacagatgagggcattgcctacaggtactgtgggamcctcagcccggctcagggagcgccctgccccccattcctgtgatgctgggaccactcctgtacaatgtcttctctgcccccagccctgtggctagcagcrggtggttggtagtcccttccttgtctctggcagtgggagctatcagctcctcactgggaaccctgatgtcttcaggggcctctttatcatcgatggcaagggtgtccttcgccagatcactgttaatgatttgcctgtgggacgctccgtggatgaggctctgcggctggtccaggccttccagtacacagacgagcatggggaaggtgagcagatacacacatgacacatgggtacatactgagcgcctccgtcactcatgcaaacattcactgcctgtcctcttacctgtccagatgggtgttagggccccaaagaagattcagctcagggctttgtctgcaggatgtttctaatgtggtaggagacaaataacgcctgacattcaaccaaggtggacaaaggggccgggctcagtggctcacggttgtattgccagcactttgggaagctgtggcaggtggatcacctgaggtcaggagttcgagaccagcctgaccaacatggtgaaaccccgtctctacgaagaacacaaaaaattagctggccgtggtggtgcacacttgtaatcccagctacttgagagactgaggcaggagttcgcttgaacccaggaggcagaggttgcagtgagctgagatcgcaccgttgtactccagcttgggcaacagagcaaaactcagtctcaaaaaaaaaaaaaattagcttggtttgtgaagcatgcctatagtcccagctactcaagaggctgaggctggaggatcacttgagcctgggaggtcaaggctgcagtaagctgtgatcgcaccactgcactccagcctgggtgacacagcaagaccctgtctcaaaaaaacaaacaaacaggccgagcgcggtggctcacgcctgtaatcccagcactttgggaggccgaggcgggcagatcatgaggtcaggagtttgagaccagcctggccaacatagtgaaacygcgtctctgctaaaaatacaaaaaaattagctgggtgcggtggcaggtgcctgtaatcccagctacttgggaggctgaggcaggagactcccttgaacccgggaggaggttgcagtaagccgagatcacaccactgcactccagcctgggcgccagtgtgagactccatctcaaaaacaacaacaacaaaaaaacctgtaggggtggggcagagggacaaagatgggactaaaggagccaaaaagacaggaagatgctgtgtctcatgcctgtagatgctgtgtctcatgcctgtagttccacctactctggagagtgaggcagaagattgcttaggcccaggaatttgagtcgagcctaggcaacatagcaataccccatctctttttttttttttttaagagatggggtattggttaaaaaaaaaaaaaaaaaaaaagaggccagatgcagtggctcacacctgtaatcccagcattttgggaggcctaggtgggtggatcacctgaggtcgggagttcgagacaagcttgaccgacatggagaaacccagtctctactaaaaatacaaaattagcccagcctggtggtgcatgcctgtaatcccagctacttsggaggctgaggcaagagaatcgtttgaagctgagaggcggaggttgcagtgagctgagatcgtgccattgcactccagcctgggcaacgagtgaagcgaaactccgtctcaaaaaataaaaaaaaaaaagaggccgggcacggtggctcatgcctgtaatcccaccactttgggaggctgaggcgggcggatcaagaggtcaggagatcgagaccatcctagctaacgcggtgaaaccctgtctctactaaaaatacaaaaaaattagtcgggcgtggtggcgggcgcctgtagtcccagctactctggcggctgaggtaggagaatggcgtgaacctgggaggcggagcttgcagtgagcagagatcgtgccactgcactccagcctgggcaacagagcaagactccatcttaaaaaaaaagaaaagaaaaaaagaagaaaaaggagagctgggtggcaaaaagaaattgaagaattaagagtaggaaaaacaccagctagaaaatactgaacttggccaggtgtagtggctcacgcctgtaatcctagcattttgggaggccaaggtgggtggatcacctgaagtcaggagttcgagatcagcctgaccaatatggtgaaaccctgtctctgctaaaagtaccaaaaaattagcagggtgtggtggcgggcacttgtagtcccagctactcaggaggctaaggcaggagaatcacttgaacgcgggaggcagaggttgcaatgagccgagatcacgccattgcactccagcctgggcaacagaggaggactctgtctcaaaaaaaaaaaaaaaaaaagaaagaaagaaaaaagaagaaaagaaaaagagaaaatactgaacttggctaggcatggtggctcacacctgtaatcccagcactttgggaggccaagacgggcagatgacttgaggtcaggagttcgagacaagcgtgactaacatggtctctaccaaaaatacaaaaattagccaggcgtggtggtgcacctctgtaattccagctagggagtctggggcatgagaatcgcttgaacccaggagggagaggttgcatgagctcagatcatgctactgtacttcagcctgggcaacagagcaagactctgtctgaaaaaaaaaaaaaagaaaaaatactgaactgggcttggagggtttatcttaatatccacattcctgggcctggaccacttgcttccagcattttcttctgcaacacaggcccttgctttgcttcaccttgaacctggggctgtagccttcatgtgcatccttgtgtcttcccacagtttgtcccgctggctggaagcctggcagtgacacgattaagcccaacgtggatgacagcaaggaatatttctccaaacacaattaggctggctaacggatagtgagcttgtgcccctgcctaggtgcctgtgctgggtgtccacctgtgcccccacctgggtgcyctatgctgacccaggaaaggccagacctgcccctccaaactccacagtatgggaccctggagggstaggccaaggccttytcatgcctccmcctagaagctgaatagtgacgccctcccccaagcccacccagccgcacacaggcctagaggtaaccaataaagtattagggaaaggtgtgagtctgtgttggtgtgctctgtcctttcgtcctcccctgcaacccccttccttcttcaggctcaggcttgggaaactgaccctgtggttgctcatcttcgccacacggtggcggtcttatcacatgcttagtgcctgctcttttcctgcttgcgctcaaggcggtttcggaggggtagggtatgccgtttgtcccttgcaaatcccaggatgccctacatccagaaatctggccatgcaaggcaaagcccacattttgtcaccagccagcctgggttcaaatgccgtttaagagctgtgatcgtctctgggtctcttcagcagtaaaatgggactgcaaacccagatcaccatgcacgtggtaaaatttgtaggagataagttatgtgaagctcggggctgaggcccctgtgtagggcccagttcctagttcctaagacggcttcctcgagctgaaaggaacccagcccagtgtagtcttatggggaagagggtggggacccagtcttaagagcagaaccaagaatgagagcctgagctacgtgcagagtgcagagtccctgctgtgagctctgccccaccccaggctggaaaggttgcctgtctgcccctggggtgggagggtggcagttaggctagaaggcaggtattagcagcaaggcagggttcccaggggtgcagtttaatattgtgtgcgttcaggaaagtagttttgctactctatgccccaatttcctcctacagaacagggctaatatgctcatttaatccacagatccactattaatgctggtacccacctaataccctctaagggtcactcatctcccttggaatttaatctacactcctccccaaggcccctgctcagtctcccttgacatctgccctgttgtggttcactccattccagacaggctggcttcctgctgttctttcacaggctcacctggctacatgaattttgccatttaagagctgctcccaaggccgggcgcagtggctcacgcctgtaatcccagcactttgggaggccgagacgggcggatcacgaggtcaggacatcgagaccatcctggctaatacagtgaaaccccctctctactaaaaatacaaaaaattagccaggcatgttggcaggtgcctgtagtcccagctacttgggaggctgaggcaggagaatggcgtgaacccgggaggcagagcttgcagtgagccgagatcgtgccactgcactctagcctgggcaacagagcgagactccgtctcaaaaaaaaaaaaaaaaaaagctgctcccagttgagcggggtggctcaggcctgtaatcccagcactttgggaggcccaggcaggcggatcacctgaggtcaggggttcgagaccagcctggccaacatggtgaaaccctgtttctactaaaaatacaaaaattagcctggcatggtgatgcacgcctgtagacccagctacttgggaggccaagcaggagaatcgcttgaatcctgtgggtggaggttgcggtaaactgagatcgagccactgcactccagcctgcctgggtgacagagggagactccatctaaaaaacacaaacaaacaaacaaaaaactgttacctctgatgctgttgttacccaggattttctcaggaccccacttcttcaaatctgttgaaaagtcatggccaggcacgatggctcacgcctgtaatcccagcattttggaggccgaggctggcagatgacctcaagtcaggagttcaagaccagcctggccaacgtgctgatacccagtctctactaaagatacaaaattagcagggcgtggtggcaggcacctataatcctagctacttgggaggctgaggcaggaaaatcgcttgaacccgaaaggcagaggttgcagtgaaccaagatcgcaccactgcactcaagtctgggtgacagagcaagaatctgtctaaaaaaaaaaaaaaaaagtcactgcaggagaagagcactggctcacgcctggaatcccagtgctttgaaaggccaaggcgggaggactgtttgacccagcagttccagaccagccagggcaacatagcagaccccatctctacaaaaataaacaaaattagccaggcatagtggtgtatgcctgtagctctagctagttgggaagttgaagtggaaggcttgcttgagcacagaaggtctaggctgcagttagctatgattgcaccactgcgctccaacctgagcaacaggacaaagacccgtctctaaaatataaaaaagaaaaagtcaccctattaaaggtccatgttcccactccattctgcaaagcatctttcctccctgccccatcattgccaccttgaccttttttttttgttttttttttttgtttgttttagtttgtttttttcctcttactagcacttaccaccacccccaaagaaccatgtttgcttgtttatttattgtcttgtctggagtggtccaggctgtgtctccagggtctagttgttctaggtattgtacaaatgaattgatgaagtgtctgttccactcaccctactgcctgtctggtttctctacctgtttttctccactgctctgggggcttccaaccccgaagccggccagactccctctaggcgggccagcagcaccagcacccccacccccacctccacgtgtcccagctgcgcgggagggagcccagcgcgagggcggtggcggcgcccagcggcccgagcagccgccccggcaggaccagacctggcagtcgccccgctcctggcctggcacccgtgaggggaaactggcaggcgggcgccgcccttcctggagggggtgggggtagaggggacggcgtcgscaaagcagcggaggcagcagcaaccctccgccccggtcaggtcagacggagggggcgtgggcgcggcggggcctaggcgccagtgtcttgaaggtggcacaggggtggctcccggagcccaggagcgctgcccgcccaccgcgggcgctctggacccaggcctggggctttccgtgcccgggcagycgcctgcccgggaaaatcccggcccccttcccggygccgcggccctgcccggcagagcgggggaggggattcccggaatctgcccagagaccgcggtcgcgtcactgggcagaatcggtccttgtatgggcagcgcttccgctgcgtcagcggggaaagccccggcgcgcgcggctgggcggggacgcgcctgcgcactccaagtctcggccggagcaccctgccttcagctcctgggtccctggaccgcgtcccgcgccccaaccatccaaccctggagatctggggacgcgggaagggtgggactcctgggctgggaccacaagatgcctgcgccgaaccgacgagggggacacatacaggaccgagccaccaacagcactgagctgggggcaaaccagtgcttttttttttccccccgccctcccagcttggaaaaaaagacaacagaaattaataaagaaccaattttttttttacttaaatagattcaataaaaagaacaaacacacacaaacacaaacacgtcttaaaataaactctttagagactaagtgcgtgtttcttttccacagtacggkgcaragaggggagggcagggggcgggggtccccttcccaatgtccccgcgggcttgagtaccaggcggsggggccagctccgccgcgatcgccccctcttcccctccctgttaaatacacaaatatattatattcaatatgaatcgagtctgtttccagcagaaaaaaaacatacaaaaaaaagtggaagggggggcttgtaaacgtcgaggtggaaggactgggcgcagggtaggagggccggagtccagtgtggtttgcggcgcccctaggtcccagggtgggtgcccaccgcctgctccctggaccccagtgggaggcgtgtgcccagccgtccaagcgagggggtgtccgtaaaggggcaggggacgttcagaaggcgtgtcccttgaccccaagcagcagctgacagccgttgctgacgtgggtcatgaccttctgtttgagctgggccacctgctcccggaggaggccggcggtactcgacagccccgcgttctcggccttgagcgtcttcaccttgtcctccaggcgcgcgatgcgctccagcttccgcttccggcacttggtggccgccagccggttccgcagccgcttgcgctccactttgatgcgctcttggtcttccatgttgatgggggacaccggcggcgtggcgtcccggctgcgcgcctccggcacggtctgcggttcctccttgaaggtggaggcgccgcggcccaagcccagctgcgccgggtggccaccggcgaagggcggcgcgtgtgggaggtagctgatggtggtcgtcgggtacgagctcccggtcccgacggcagccccggcgcctcccgaggacgcagaggctggggagtagctgctgaggttggtgtaaacgggaggtggctccgggccggcgtagacgcccccgggcccagccgggggccccccggtagcgcccagkgacacgttggggggtgtcacgtggttcatcttgtgcagatcgtccagggctttgacaaagccgtcggcgaagccctcctgctcctcggtgacgccgccccctgcgccccctgcacctccaccgctgccacccccgcgggggtaaaagtactgtcccgggggtgtaggcgtcgtcgtgatcacgccgttgctgttggggacaatcaggcgttccagctccgaagaggcgagcttgagagacgcgccggtgtccgagccctgaccagaaaagtagctgccgccaccgccgccctctgggccgggtccgcgagccccaggcgctttgagactccggtaggggtcggccaggttgaccgccaggctcggtttcaggagtttgtagtcgtgtagagagaggccaccaggggcccggccgtatcccgtagctgtgtatgagtcgtcgtggtagaagggctgttccattttagtgcacatccgggcggcccaggcggtctggggagggtccctgcggggccgctccgggcctcgctgcagcgagcggcgagctctccgctgcggtgaccggactgggtgcctggtcgcgcgttctcgggggctggcgcgggcgggtagcagccagccggcagctgtgcgcaaaagccctgtcaggcttcccgagcccccgtcgccctctctggcgcgatagctttcctggcgtcgtttcccccagctcccagctccctgctggctccgaggctggcctggccgctctcaaggtcccagccgctcagcctgagccacacgcctttataccgcgctagtcagccacggaagtgcgctccgattggccgtcgccggagccgggcccccgcgcccccctcctcgagcgtggggaaggggaggaggcggctcgcgtcactgtcaggaagcgcgtgtccttgtaaacagcggccacgggccgggtggctcggcggggctgcagggggaggggctcaaaggacctcggggtacgcatggaaggaggtgctggggggcccaggcacatgagtgaggggtttcagggaggaggatgatttccctggagtccactgggacaaataccaggacctggtacgcagcaagtggggtgagggtcccagtatgtgcgaagaaacccctgaggtacccagaatacgagaggggtaggaggactgacaatccattgggagaccccaaaaagcagaaatgagggttaagcactgtaaatcgggagggttaaggagacacctgacccaggaattgactgggggtcccgggctcagaaggatgcgggactggaattttcacaggacggaggaggggagagatcaaaaggggtgagtgggtggagctgcatgacccattaaattgcaagaaatgagtaggggtccaggagctcatgggagctgagtccagagtctgaggct

SEQ ID NO: 93661 - DNA, 19079 bp, Homo sapiens
agagtccccatcctcctctagctgtgtcatggggtacagcccttcacttcggtgaactggagtttccatcttcatgaaatagggcagcacagcctccctcctgggaactaagtacatagagtagatagagttgcatctgagttgcatctgcaactctatataccaggcaactagttgtcaaatgctaattactgtcatcatccttaaagacttgggcggcaatgtttccattattttcacgatggggaaacgcaggttccagaggttgagcaatggccacgaagccacactgctaggacctgagggtgtgagcttagctgcaacctccctctttggcccctgctcataccaagccaggtgggtgaactgagagtccaccgagacgcccagcacttcacagcccagcttgcggaagtcctctgcacggttgctgaacgcgatgatctcggtggggcacacaaaagtgaagtccagagggtagaaaaagaggaccacgtacttccctggggaggagggacacagaggagttagggcccagcttctctyatgcacggccccgcttctacctgggccccctccgggcggcgctcacctttgtagtccgacagcttcacctctttgaaggcgccatcaaccaccgctgtggmcttgaagtcaggggctggctttccgatgcgcgcgttaccggaggccatgactgaaagctgagacccccgcccggtcagtgcgcccgggaagacactttgtcctcccaacccaaggtcgcgctgcgtgctgggccctatgactgagtcagcacggcggaggcgacagcactaaccctcaccctcccgggtacccggtctacgaggcccggaggctgccggagacccgctctcctgaccagagcacgagtgacccagccactgccaccagcaccccacgagcgagtcggccggagggcggtgtcgcaagcccccagcccagaaggagacagtgaggcccgcacgagcagggggcgggaagtcgggcgatcaggcctgcgctgcaaggctgtggcctcggtttcccccgcaaggacaaaggaggccactatagcggatggaaagcaaaggcggccagcactaaagtcaggatcgggccaaagcagcctgaagggggtcctcccgccaggtgcactccgggtgttcatacctgcgtgggcaaaggctagacgcacggacgatcacacgcgtggacccgcgttctcagcgccaagtgagccctgggccgcgaagccttttatgcccggcccgaaccaagacgtgcacggcgcgggggagggagcggacgagcggagcggtcgggtccactgcgcccgcaggtgcrggggagcgtgcggccgggtccatgcgcctgcgggcggcggggggagacgcgttgccttcggccgggaccactgcacctgcccgcgtgggtaatgcgcccgccgcagactccgcgcacgactccgcctgggagcgcgttgggggccgttggagtccagcatggcgcggaccccgggggcgctgctgctggcgcctctgctactcctgcagctggcgacccctgccctggtctaccaggactatcagtacttagggcagcagggcgaaggtgacagctgggagcagctgaggctgcagcatctaaagggtaacctcaggcggcggggatgacgatgcccaaaggctccccgttgccctacttctcctgctggctgcaaagggaccttcctcggcgggctgcaaatctccacccagctccgcactggaggcgtccccttgggctggttacttttctctaaggctcggtttactcttggatatattgaaatagatactgctttaaagcagctcccaggggaagagagggtgtgggcaggacactgaagctgtcactcggggataggtgccaggaagggcagagacagagaaagaagggggcgggcaagcttgggaaatcagagagggtccgattgcagaagacccgtgaccagtgcagcgagaacgacaagcgaaagtcccatatggaaagatttggggaaagaatgtccaaggaagagggaatagcaaatgccaaggtgaaaagtcctgaaggagaaatggaaagaggtcggtgaggtgtggcagagacatgggtgtgggagggtaggaggtgtcagaccttggtgagcggtgagttgggataagatcggagttgggataagatctgtctcataggggaaaggggcagattcagtaaagagccctttaaagtgatcacagtggccggcgcggtagctcacgcctataatcctagcactttgggaggctgaggtgggaggatcccttggtctcggagaccagaccagcctggcccacacagcaagactccatctctacaaaaaatattttaaaattagcctgacttgatggcccagcactttgggaggccgaggcgggaggactgcttgagcccaggaattcaagaccagcctgggcaacatggagagaccccctactctacaaaaataaataaataaataaaaataaaaaataaattagcctgccatggtggcatgcgcctgtagtcccagctactcaagaggctgatacaggaggaccatttgtgccaaggagtttgaagctgcagtgagccatgattatgcccttgcattccaacctgggtaacagagcaagatcttgtctcaaaataaataaattaaataaataaacaaactgatcataataaattggtttgtatatgctagcacagcaccgggagatttacttaccttcattatgtcaattatgccatttatcacttgacaaccctgctgtcaggtggcattgtgccttctaggtagggccatggtcacacccctgaagacagaagtcagcttcaaatggcgggcaccaaggatgttgtaggacactcacaactgggcaggctggcacagcctggaagtgtcaggttgtagttcctctggcccacttaccccgtatatgagcttggaaggttggcttgctgtctctgggtcttggtttccccacctgagactcgtggaaatattaaatgaggccaggcatggtggctggctcacacctgtaatcccagcactttgggaggctgagatgggagtatcacttgagcccaggagttccagaccagcctgggcaacatggtgaaacaccgtctctgcaaaaaatacaaaaaattagccaggcacagtggcatgtgcctgtagtcccagctacttggtaggccgaggtaggaggattgcttgagcccaggaggttgaggctgcagtgagctgtgactgcgccactgcactccagcctgggcgacagagcgagaccctgtctcaaaaaaaaaaaaaaaaaaaaaaaaaaagcttaaatgagataatctgtggcagggtgtctggcatagaagcagagtctagcgaatatgtgcttctcttattcgttagtatctttatctttctccctctctgggggaggggattgggagtaggccccctccacgtaggtcttcacctctgccctccttctctagaagtcgaggactcaatccttggcccgtggggaaagtggcggtgtctctgcgacctgggcaagcaggagcgcagccgcgaggtagkgggcacagcgccgggcccggttttcatggacccggagaasctgatccagttacggccctgccggcaacgggattgtccatcctgcaagcccttcgactgcgactggaggctctgagcccgggtgagagagcagggccggggcaagttgcggggcccagggtgggcgcggagggaggatgtgcggtgcggggcgggtatgaagcgagtttgaggaagggagaactggggctccaagtcttgagtgacttgaggctgatttggttagggggaagctgagtcaggagccgtgagccccgctgatatctagggagaaaaggagaaaagtggagggggcgccgggcgccggggctcacgcctgtaattccagcattttgggaggccgaggcaggcggatctcttgagtcctggagttcaagattagtctgggcaatatcgttgagatcacctctccataaaaatttttaaaattaggccgggcgcggtggctcacgcccgcaatcccagcactttgggaggccaaggcaggcggatcacaaggtcaggagatcgagaccatcctggctaaaacggtgaaaccccgtctctactaaaaatataaaaaattagctgggcgcggtggcgggcgcctgtagtcccagctactcgggaggctgaggcaggagaatggcatgaacccgggaggcggagcctgcagtgagccgagatcgcgccactgcactccagcctgggcgacagagcgagactctgtctcaaaaaaaaccaaacaaacaaacaaacaaacaaaaacatttaagttagatgagcgtggcggcacatgcctgtggtcccagctactcggtacgatggggaggaaggatcgcttgagcctgggaggcaaaggttacaataagccgagatcgctacactgctatccagcctgggcaacagagtaacatcctgtctcaaaaaaaaaaaaaaaaaaaaaaaaaaaaaaaagtggagggggaggcgaagaggagtaaaaggagataaagagacaatgaactaggaccctgaggaaggggcatgagcctggtaaggggcgggaacccacaggcagaggacatgagccccagtgagcccagggaatagaagtggtggatgccaggcactgtggctggctcaggcttgtaatcccaacactttgggaggctgaggcgaccggatcgcttgagcccaggagtttgaagccagcctgggcaacataatgagaccccgtctctacaaaaaataccaaaaatagtcgggcatggtggtgtggtgtgcacctgtagtccagctgcttgggagactgaggtgggaggatcgcgtcagcccaggaggtggaggttgcagtgagccaagatcgcgccactgcactccagcctggacaacagagagagaccctgtctaaaaaaaaaagaaggccgggtgcggtggctcacgcctgcaatcccaacactttgggaggccgaggcgggcggatcacaaggtcaggaaatcgagaccaacctggctaacacggtgaaaccccatctctactaaaaagtacaaaaaattagccgggtgtggtggcgggcgcctgtagtcccagctattcgggagactgaggcaggagaatggcgtgaacccgggacgcggagcttgcagtgagcggagatggcgccattgcactccagcctgggcgacaagagcgagactctgtctcaaaaaaaaaaaaaagaaaaaaaaaaagtgggtcgaggggtgggggtggggacattcattctaagttgggaggaatgagcttctatagggagcagagaccctgagcaggagtccaccgaggtctgtgatctccaacgggggtggggaaggcttggcctgaatgagacagaggttaggaagcacagatcttgcacggagtggaggtgggccgaagggagcaaccaagagagggagtttggggactccaaatccaaaagcctgggtttagtggaagcggggctacctggtccaggggacttagaatgtgtacagaagcagggaccgcaagtacagggcctgaatccaagtggcagttggggacccagtgatgcggtgacccgtgtcctgggagtsgggtgatatttgactctctagttccccgttaggctgggtcttcgaagctacgtctcagtttccctcttatttccccctcttcccaccgggccacgcaggcggggccccagagaccgtgaagcagagcttgcaaagtgaccccgtccaccgaattccccaagctgagtgttcggccatagcccttcgggactacaattcccaggagggcgcacggcagcgacgtcggcgtcggctgcgtaagcgtccacggcggcgggagcgccaggggcgtgttctgcccgcggattggccggaagcaggcgccgcttcgaggcccgcggaaaacgcgcgccgagacccgctcctgcagtattagttcttgcagctggtggyggcggctgaggcggcatggatctcagcgagctggagagagacaatacrggccgctgtcgcctgagttcgcctgtgcccgcggtgtgccgcaaggagccttgcgtcctgggcgtcgatgaggcgggcaggggccccgtgctgggtgcgcccctagggccagggaggggaggggcgtggtacggaggatgcgggaaacgggagtcgggattgcacygcaccaagggaggggatgtggtcgtggtgatggcacctaaagaagcagtgatgatagaacagggatgaatggcawctttcacgggctcagtgattggaccccggctgccagaaaactgacaccccttctccccaggccccatggtctacgccatctgttattgtcccctgcctcgcctggcagatctggaggcgctgaaagtggcaggtgagcccgaggtgtgcgtctggggaagggattcctgggtatgtgcaggggcaggtgagaactgaaaggggagggcaggaactgggagaaccagctgttccccttctcttccaaacctcctcccagactcaaagaccctattggagagcgagcgggaaaggctgtttgcgaaaatggaggacacggactttgtcggctgggcgctggatgtgctgtctccaaacctcatctctaccagcatgcttgggcggtgaggggtccccgggaggggcagccagcatgggctgaccaagctttgttcctagaatgagattaactgggctctgttccccaccacagggtcaaatacaacctkaactccctgtcacatgatacagccactgggcttatacagtatgcattggaccagggcgtgaacgtcacccaggtgagttaactgtaagttgtccccatttggtcatctcaggataaaatggggacaaaacaggagttcgagactgcagtgagccatgatcatgccacagcactccatcctgggtgacaaaggaagccccccaactcaaaaatggaggcagggcgcagtggctcacgcctataatcgcagcactttgggaagccgcggcgggtagatcaccggaggtcaagagttcgagaccagcctgaccaacatggtgaaaccccgtctctactaaaaatacaaaaattagctggacgtggtggcaggcgcctgtaatcctagctactcaggaggctgagacaggagaatcgcttgaacccaggaggcagaagttgcagtgagccaagattgtgccattgcactccaacccgggcaacagagcaagaccctgtctcaaaaaaataaaaaataaaaaataaactaaaaatgggagaccaggcgcagtggctcacggctgtaatcccagcgtttcaggaggctgaggcaggcagatcacctgaggtcaggagttgaagaccatcctggccaacatggtgaaacctcatctctactgaaaatacaaaaaattagcccagcatggtggcgggtgcctgtaatcccacctattggtgaggccgaggcagaagaattgctcgaacccgggaggcggaggttgcagtgaggtgagatcgcgccattgcactccagcctgggggacagagcgaaaaataaaaataaaaataaaataaaaaataaatgtgggcaaaaatgtgcagtgtgcagattcagcatcagatacgtctggagtgcctcgggcatattcattgctactgttgatttcgtgctcctgtttctgccctaaatgtgtgccacactgacgaccacagtgtagcccctagtcccgtctccatctaatctctccctcatcctaaaggctcagtctccagaacaaatcctacattgtctacctgtcacctctgtcctagcccaggacaccccccactccctggacacctgctgagtgtcgtctctcgtccctcaccctcctatcccctccaatctgttccccaagcagcaacagaaggtagtctttttgaaatgcacatctcgacatttagttttccgatcacagtggaaattaaatcaggaaaattcacagtcgagtggggcagaattacattaaattaccagagaaaaacataaatcagcattgcctcgaatgctctcaatgaaagaayggaccgttctgagagaataacaaggcaaaataaccttgaygtaggaattgtatgctgggtatggtggctcacgcctgtaatcccagcactttgggaagctgaggtgagcaaattggttgaggctaggagttccagaccagcctgggcaacatagcgagactccatctccacaaaaagaagaagaaagaaaggaattatagcaaggtagaccctgctgaggagggacctgaggaccaggcccaaatgcagagctggcgatacagtaactggygtagacagacaagggccctacccgtaggsgttcagggcctagcctgggcagaaagatggtcagctggaggttgggcgcagtagctcacgcctgtaatcccagcactttgggaggccgaggcgggcggatcatcaggtcaggagttcgagaccagcctgaccaacatggtgaaaccccatctctactaaaaataaaaaataaaaaaataaaacatgaaagatggtcagctggtaaacaaaaaataaaggttgtttctgaaaacagtagtgctgtggagataccactttcccccagcagctcttggaccctctcttcggtgctgcagccaaaggcccccatgcatgggcccagcatcatgaacctggtcccagctcagggcctttgtactggctgttctcacacctagagccctcttccccagatctctgcacagttcacttcctcacctccttcaagcctttattcaccactacacctagctaactttttattttttgtagaaacagggtctccatatgttgcccaggttggtctcaaccacctgccctcaagcgatcctcccacttcggcttcctaaagtgttgggattacaggcttgtgctaacgcactctaccaatttttttctagtgttttctgccacctcagttcctagaacagtatgtggcatgcagtaggtgctaaataagttagagtaaaagcagcgtgatagagaaagcctcttcaggaggtgagttttttctttattttattgkatttattttatgtttttataaagatggggtctcactgtgttgccaagcctggcctcaaactcccaggatcaagcgatcctcccgcctcagcctcccaaagtgctgggatcacaggcctgaacaactttgcctggtctaggaggagatgttcgagttgaaatccctgattgatccatcctggggacgtgctggagaagaggattctgggtagcaggaagaacgtgccagggctgtgaggctagagcattggtacagttgtttgttcaattaatatgtgtctgttgctgtggcaggtattcgtggacaccgtagggatgccagagacataccaggcgcggctgcarcaaagttttcccgggattgaggtgacggtcaaggccaaagcagatgccctctacccggtggttagtgctgccagcatctgtgccaaggtcagtaccctactagccatggctggcttccaycatcccactatataggggccaggcatggccaccaaagggaaggagggagattccaggtgcctgtyttgcccacaggtggcccgggaccaggccgtgaagaaatggcagttcgtggagaaactgcaggactyggatactgawtatggctcaggctaccccaatggtgagcagacacrtgaccatggtactaatgttgaaatggccagggctgagcacacttctgaggttttctttttttcctttctgtcatttatcattttattttgcttattttttgtttttatttgttatttttgtttattttttgagacggagtttcgctctttttgcccaggctggagtgtaatggtgcgatctcggctcaccgcaacctccacctcctggcttcaagcgattctcctgcctcagcctcgcgagtagctgggattacaggcatgtgccaccacacccagctaattttgtgtttttagtagagactagttttctccatgttggtcaggctggtcttgaactcctgacctcaggtgatctgcctggctcagcctcccaaagtgctgggattacaggcatgagccaccgtgcccagcctattttttgtttttatagagatggggtcttgtcatgttgcccaggctggtctcaaattcctggagtcaagcagtcctcccaccttggtctttcaaagtgctgggattacagccatgagccaccacccctggccctttttttcttctttttttaaagagatggggtctccctatgttgcccagcctggtcttgaattcctgggcttaagtgatcctcctgccttggactcccaaatagctaggattacaggtgtgaactactgtgcctggctggaggttttctaaattgctctggtcaccctactccacagtgaaagaggccaagtgttagacagtggtgccatttgtttatggccacacagccagtgagtgatagagctgaattccaggccataggattgctgctgtcttccccgcttcccactttgctgtctttctggagccccagtgatggactgagacccaaggtgggcatttgtccctttgttaaggggaaggggaccaggcgtggtggctcatgcctgtaatcccagcactttgggaagctgaggtaggagaaccgcttgagtcctcgagttcaagaccagcctgggcaacatagcgagacccccatctctataaaaaatttaaaaaattagccggttatagtggtgcccacctgtagtcccagctactctggaggaggaggctaaggtgggtgggttgcttgagcccaggagttggaggctgcagtgagctatgattatgccactgcactccagccttggtgacaagatgagatcttgtgtcaaaaaaaaaaataatgttagccaggcgtggtggctcacacctgtaatcccaggactttgggaggctgaggcaggtggatcctttgaggtcaggagttctagaccagcctgaccaacgtggtgaaaccccatctctactaaaaatacaaaattagctggacgtggtggcacacgcccgtaatcccagcaactcgggaggctgaggcaggagaattacttaaacctgggaggtggaggttgcagtgagccgagatcgcataattgcactccagcctgggaaatgagcaaaattccatctcaaaataataataataataataataataatatttaatgacaggctgggccaggtggctcatgcccgtaatcctagcattttaagagacagaggcaggtagatcatgtgaactcaggaattcacaaccagcctgggcaatatgacaagaccccatctctacaaaaaatacaaaaattaggtgtggtggtgcgcacctgtagtcccagctacttgggaggctgaggtgagaggatggcttgagcctgggaggcagaggttgcattgagctgtgataatgtcactgcactccagcctgggtaatagagcgagaccctatctcaaaaaaataaaaaggctgggtgtggtgtttacacctgtaatcccagcactttgggaggctgaggtgggtggatcacctgaggtcaggagtttgagaccagcctgcctgtccaatatggtgaaaccccgtctctactaaaaatacaaaaattagccaggtatggtggtgggtggctgtagtcccagctacttgggaggctgaggcaggagaatcgcttgaacctgggaggcgsaggttgcagtgagccgagatcgcaccattgcactacagcctgggtgacagagcaagactccatttcaaaaaataagtaaataaaataaaaatgtttaatgacttgttcttggaggtcaaggagatgtctcagaggcagtctccctgcactgcccttttagcagctcttggccaggtaaaggtcctgtggcaagaaggtgcttcagaccataggaggtgccccaggtactcaggaggaagccttagaagagcggcaaggaggccgggcgtggtggctcatgcctgtaatcccagcactttgggaggccgakggrggtagatcacgaggtcaagcaattgagaccatcctggccaacatggtgaaacctcrtcactactaaaaacacaaaatttagctgggcatggtggcatgcgcctgtagtcccagctacttgggaggctgaggcrggagaatcgcttgaatccgggaggtggaggttgcagtgagctgagatcgcgccactgcactccagcctggctacagagtgrgactccatctcaaagaaaaaaaaaagagtggcagggagcttgaatgttatggtgcaacttggactgtcaccattgcccaccctaccccagatcccaagacaaaagcgtggttgaaggagcacgtggagcctgtgttcggcttcccccagtttgtccggttcagctggcgcacggcccagaccatcctggagaaagaggcggaagatgttatatggtgggtgtcatggatgtcctgggggtgctatagggaaggaaggagggaggccagcgttcagccctgcctgagagggttgctccctgtgtaagtggtcactgtcatcacctctctcccacagggaggactcagcatccgagaatcaggagggactcaggaagatcacatcctacttcctcaatgaagggtcccaagcccgtccccgttcttcccaccgatatttcctggaacgcggcctggagtcagcaaccagcctctagcagctgcctctacgcgctctacctgcttccccaacccagacattaaaattgtttaaggagaaccacacgtaggggatgtacttttgggacagaagcaaggtgggagtgtgctctgcagccgggtccagctacttccttttggaaccttaaatagaatgggtgttggttgattaattttatttggtttgatttttttcatttttaaattttatttattttattttattttattttatttttttgagagacgaagtctcactctgtcacccaggctggagtagaatggggcaatctcagctcactgcaacctctgccttccaggttcaagcgattctcctgcctcaatttcccaagcagctgggactataggcgtgtgccatgcccaactaatttttttttttttttgagacacagtctcctgttgcccaggctggagtaccatggcacaatcttggctcactgcaacctccacctccctggttcaagcaattcccctgcctcagcctcctgagtagctgggattacaggtgcacaccaccacacccggctaattttcttttcttttctttctttcttttttttttaatttgagacagagtctcactttgtcaccaggctggagtgcagtgatgcaattttggctcactgcaacctctgcctcctgggttcaagcgattctcctgcctcagcctcccacgtagctgtgactacaggcatgcgccaccacactcagctaatttttgtatttttagtagagacggggtttcaccacgttggccagactggtcttaaactgctgacctcaggcaatctgcccgccttggcctctcaaagtgctgggattacaggtgtgagccactgcgcctggcctaatttttgtattttttagtagagacaaggtttcactatatgttagtcaggctgctctctacctcctgacctcaggtgatctgcccacctcagcctctcaaagtgctgggattacaggcatgagccactgcaccgacctttttagttatatttttaatttttaaaaatttttaaattttctttcttgagatggagtctcgctctgtcacccaggctggagtgcattggctcaatcttagctcactgtaacctctgcctcccaggttcaaatgattctcctgcctcagcctcccgagtagctgggactacaggtgcgtgccaccaggcctggctaattttttgtatttttagtagaaacacggtttcaccgtgttagccatgatggtctcaatcttctgaccttgtgatccgtctgcttcagcctcccaaagtgctgggattacaggcgtgagccgccatgcattgcctatttttatttaaaaaattttttgagacagaatctcactctgtcacccaggctggagtgcagtggtgcgatctcagctcagtgtaacctccgcctcctgggtttaagtgattctcccaccttaacctcctgagtagctgaggttccaggcacacgccacgatgcccaactaatttttgtattttttgtagagatgaggtttcatcatgtcgcccaggctggtcttgtagtcctgggttcaagtgatctgcccgctgtgacctctcaatgtgtgagctaccatacctggctgactaatatgtaaaatacatgatgtggctgggcgcaggggctcatacatgtaatcctagtgctttggaaggctgagtcaggaggatcttgaccagtctggacaacatagggtaacaagagcgaaactctgtctcaaaaaaaaaaaaaaaaaaaaaaaaatgctgggctgcatgggggaagataagaaaaaataaagaaaggtcacgaaccaaacaaaaatcttggcgggcagggtgccgtgtggctgcagtcccagcttttctggaggttgaggtaggctccagcatgggcgacagagcaagaccatgtctcaaaaaaaaaagcatatctgcgcattaatgtttggaacaagctgcattctctccagaaggacctagaaggcacagataagcccaccagtgatttggggcaggttgggatggaagcttctcaaatgttctcccttctttctttggttctgtttttgttggttttattttgttttgttttgagacagagtctcgttctgtcacccaggctggagtgcagtggcacagtcttaagtcactgcaacccccacttcccaggttcaagcaattctcccacctcagcctcccgaacagctgggactacaccatgcccagctagtttttgtatttttaatagtgacagggtttcaccatgttggccaggctggtcttgaacccctgacctcaagtgacccgcctgcctcggtctcccaatgtgctgggattataagtgtaagccactgtgcccagtctgtttttgttttctgagacagggtctccgtcacccagaccgaagtgttgccatgtgatcttggctcattgaagcttcgaatgcctgggctcacagggtcctcccacctcagccctgtgagtaagtggaactacaagtatgccaccacgcacagccaatttaaaaaaaatggctgggcgcggtggctcacgcctgtaatcccagcactttgggaggccgaggtgggtggatcacgaggtcaggagatcgagaccatcctggctaacacggtgaaaccccgtctctactaaaaatacaaaaaaattatctgggcgtggtggtgggcgcctgtagtcccagctactttggatgctgaggcagaagaatggcatgaacccgggaggcagagcttgtagtgagccaagatagcgccactgcactgcagcctgagtgacagtgcgagactgagcctcaaaaaaataaataaataaataaaattaaaaaaaatttggtagagacaggatcgccctgttgcccagattggtctctcaaattcctgagctcaagcgatcctcccatctcaccctcccaaagttcttgggattacaggcgtgggccactgcgcctgccctgctctcttttttgagacagagtcttgctttgttgcccaggctggagtgcagtgttgcaatcttgacttactgtgccctcaaactcctgaggtcaagcaaccctcctgcctcggccttcaagtagctagcactgcaggcgtgtatcactatgctcagctaagttttttatttcatagagatggggccttcctatgtgagaggaggcctagcactttgggagtccaacggtatgttgtgttcttgagatgaggtctcactctgtcacccaggctggagtgcaatggcataatcttggcttactgaagcctccacctcccgggctccagcgattctcctgcctcagcctcccaagtagctgggattacagatgcgcacctccatgcccacctcggcctcccaagtgctgggattacaagcgtgagccacacgcccggcccctatacagttttttttttttttttttcttgagatggatgctcattctgtatcccacgtccgacataggaggctgcggcaggagaatcgcttgaacccggctggtggaggttgcagtgagccgagattgcgccactgtactccagcctgggcgatagtcagagactcagtcacaaaaaaaaaaaaaaaaaaatttgggctgggtatggtggctcacgcctgtaatcccaggactttgggcggctgaggcgggcagaacacctgaggtcaggagtttgagatcagcctggccaacatggcaaaaccccgtctctactaaaaatacaaaaattagctggacatggtggcagatgcctgtaatcccagctactcaggaggctgaggcagaaatgcttgaacctgggaggtggaggttgcagtgagccaagatcgtgccattgcgctccaacctgggcaacagagtgagactccgtctcaaagaaaaaaaattttttttatagagatgggggtcttgctatgttgcccagtttgctctcaaactccgggcccaaaggatcctcccaccatagcctcccaaagtgttaaattgttgagattacaggcatgagacacagtgcccggccaagtgtcctaatttcttattgtcattgaattagagctcacaaatatgacctcattttactttaattacccctttaaacacgctctttccaaacacagtcacgttttgacatgctgggggttaggacttgaacatatgaattggaggagacccattcaacccataacagagcatttctccactccacgcaaattctttgtaggacgcagaagccagcactgcaccagccagccagaatcccagaactgtcctttgacagtggaggctagagtgcccaggaatgcatgatgggggacccagctctgatctgggggtctcagagcctgaggaactgactggcagaggtctgcggggtgaatgcggtggaataagtgactggaggatggagggggttccaggcattgggcacgtgttgaggcctagaaatgggagacctggcttcaagaaggcccgagaggccaggcgccgtggctcacgcctgtaatcccagcgctttgggaggccgaggtgggcagatcacgaggtcaagagatggagactatcctggccaacatggtgaaacctcatctctaccaaaaatacaaaaattagctgggtgtggtggtgggtgcctgtagtcccagctactctggaggctgaggcaggagaatcacttaaacatgggaggcgaaggtttcagtgagccaagatcatgccactgcactccagcctggtgacagagcaagactccgtctcaaaaaaaaaaaaaaaaaaagggcccaagaagagggcagtgagagtaggcattcgggaggaggtgtggtctccacccaagagacaccctctatccaaccctcgtcttgttgttattattttgttatttgacttaaaagcttatttttctttttcttttgagatggagactcactcttgctccggctgtgttgcagtggcatctcggctcactgcaacctccgccacatgggttcaagtgagcacatccggctcattttgtatttcttttttttttttttttttttgagactgagtcttgctctatcgcccaggctagagtgcaatggcccaatctcggctcactgcaaccattggctccctggttcaagcgattctcctgccttagactcctgagtagctgggattacaggcaccgaccaccccgcccagctaattttgtttttctctttttttttgagatggaatcttgctttgtctcccaggctgcagtacagtggtgtgatcttggctcactgcaacctccgcctcccgggttcaagaaattcttctgcctcagcctcccaagtagctgggactacagtcacgtgccaccatgcctggctaattttttgtatttttaataaagaaggggtttccccatgttagccaggatggtctcaatctcctgacgtcgtgatctgcccgccttggcctcccaaaatgctgggattacaggcgtgagccactgtgccccgccttctttgactttttgtagacaccagggggtgggtcttgaagtcctgagctcaaggggtctcctgccttggcctccccaagtgctaggattataagtaaaagccaccagccaccatgtgcagcctgcaaatgttacttcttttttttttttttctggaatagagcctcactctgtcacccaggctggagtgcagtggtgcgatctcagctcactgcatcctctgcctcctgggttcaagcaattctcctgcctcagctcccgagtagctgggattataggaacctaccaccacaccctgctaatttttgtatttttagtacagacgaagtttcaccaagttggccaggctggtcttgaactcctgacctcaggttatccacccgcctcagcctcccaaagtgctgggattacaggcatgagccaccgcgcccggcctgcaaatgttacttctaacaacagcctttgaatttgtgagaactcagtgctgggtccccgtcccagcagcgtgaagctcacacgggagttggaaagagtccagggttccacactggcctgctgaagatcccgagtgtcatgtttttgaggttttttttaagaaacagagttggctgggtgcggtggctcacgcctgtaatcccagcactttgggaggcca

SEQ ID NO: 93662 - DNA, 21018 bp, Homo sapiens
gtggtacaatctccgctcactgcaacctccgcctcccggattcaagagattcccctgcctcaggctcccgagtagctgggattacaggcacgcaccatcacacccagctaatttctgtatttttagtagagacagcgtttcaccatgttggtcaggctggtctcgaattcctgacctcgtgatctgcccggctcagcctcccaacatgctgggattacaggcatgagccattgcgcccggcctcatgctggacttcttacctacagaactgtaagacaatgtatttctgttgttttgagctgctaagtgtgtggtcatttgttatagaatgaccacaatagaacaatagaaaacaaagacagcactgagagctatgcacataacccaaggcccccggatgcaagcgcacatgtgcacaagggtaccacagggtaggcgcactgacctgcgcatttaccagcyggatgagcttgtcaaggttcttgaaccacatgttggcattctcatattggaagtccgagcccatggtcatcacartgtggttggtgcgrtaataccggccctgcaggcaagaggggagtcctgaagccagaggatcctgggccatccctgtgtatagctgtgttttgatgtatatggggtcaaggatgttgggtgcacaggcatgggtgggggtatggcacttgggagcgtggggacacagataaaagtagccaccagttgttgagcagttctcttggacccactacctagaagagggcatccagtcaccatgccatgctatctcttgcccagcctatgctatctcttctaatgaggaatgcacataaatccaggagggggacattgtgatggtgaatagaatagcatcttcctccagggggcatgagaacatgattacaggggctcacacctgtaatcccagctactcaggagactgaggcaggaggatcgcttgagtctaggagtttaagaccaacctgggccacacagcaagaccctgtctcaagaaaaaaaaaaaaaattaatctaaaacaattttttttttgagacagagtttcactctgctgcccaagctagagtgaagtgacgtgatctcggctcactgcaacctccacctgccaggttcaagcgactctcttgccttagcctcccaagtagctgggattacaggcgtgcgccaccacacccgactaatttttgtatttttagtagagacagggtttcgtcattttggctatgctggtcttgaactcctgacttcagatgatctgcccatctcggcctctcaaaatgctgggattataggcgtgagccaccatgcccagccatcaatttttaaagaaaggaaaaaaaaatttttttaaggagaacgtgttatgccaggcatggtggctcacacctatatcctagcactttgggaggccaaggcaggaggatcacttgagttcaggagtttgagaccagcctgggccacatggtgagaccttatctctgtgaaaaaataatgttttttaattataaaaatgttaaaggctggacgcggtggctcacgcctgtaatcccagcactttgagaggccaaggctgtgggtcaaaaggttaggagttcgagaccagcctggccaatatggtgaaaccccctttctactaaaaagacataaaacttagccgagcatggtggtgggcacctgtaatcccagctactcgggaggctgaggcagaagaatcgcttggacccagtaggtggaggttgcagtgagccgagatcgtgccactgcactccagcctgggcgacagagtgagtctaaaaaaaataaaaaaggaattctcaataaaaatgttaaaaatagactaggcacagtggcccacacctgtaatcccagcactttgggaggttgaggcgggcagatcacctgaggtcaagaccagcctggtcaacatgacgaaaccctgtctactaaaaatacaaaaattagctgggtgtggtggcaggtgcctctaatcccagcttcttaggaggctgaggcaggagaatcgcttgaacccgggaggcggaggttgcagtgagctgagatcatgccactgcactccagcctgggtgacagagcaagactctgtctcaaaaaaaaaaaaataataataaataaataaaaatgttaaaaatagaggccaggtgcggtggctcatgcctgtaatcccggcactttgggaggccgaggcaagcagatcacttgagctcaggagtttgagaccagcctggacaacatgatgagaccccagtgcaaaaatacaaaaattagctggatgtgcttgtttgaacccaggaggcagaggttgcagtgagccgagatcgcaccactgcactccagcctgggtgacagagtaagactgtctcaaaaaaattaaaaataaggagaacgtgttaggggatgcctgtaccatggaaagagctcattgtattgtatataccggactcgaaggttctggacaccagggttacctgggcagtggccacatttaggaagtaatcgaccagctccttggcgttgtactcggggctgcgagggtcctccaccascggctgatcgacacacagcacatcccagcacagattccttggcgggttgtaaccattgggaagcacacctgcaggtcacaccaagttcaaggggtggcccatcacccagaccttccctggtttcaaagccggccatgtcccacccaggatgggcttcagaatttgtgtcccaatgcaaaaggaaatgcagggcctttgttcccagactataggaattccaggacagtgacaacagagcagatatcaagcccagggcccttctgagtgtgtggcaccatggctggccctgccctcaccaagccccctaccagtgaagaggtccgmrgtygggggcttcaggctggtgctggcccgccacacctgctccatctccagcttctgcatccgtacccacttatcttgataatcaaggcgcccaaagaagaagccgtcgaagcccatctggggatgagggaggaaaaggcagtgtgaattagtgcccagccctctcaccaccaaactcccctctgcttgggaggggcaggtcagagcacaggttaaaaagcagtgctaggtcgatgtggtggctcttgcctatgatcccagccttctgggaggccaaaacaggaggatcacttaaacccaggagtttttgagaccagcctgcacaacacgggcagactgtctacaaaaaatttaaaaattagccaggcgtagtggtgcgctcttgtagtctcatctactaggggggctgagacaggagaatcgcttgaatccgggagattgaggctatagtgagttaggattgcaccactgcactccagcctggatgacagcaagaccctgtctcaaaaaacaaaaacaaaaacacgtagggctgaaacagagaggcctccagcttatttccaagcttggggaagtttcagaactcaccaccttgggctagcagggagagggcgggtccaacatcagaacccaggttcacctccccagcactgtcaaagcgcagagcaggcctgactccaggaatgaggttcccccttccacagcctgaggatggatggggtctgagcacaggtaatgaacctgtttttaaggcagcctaggcatccacttgccacccggtttagggaggagccaggacccgagctagtgggtggggccagaacaccaagaggggcctattaggggagagggcggagccagccggagctgggtcagcctgggctgggcatagccggctgaggccagagctcaaaagccactggctttacggctcactcaaggggcagggcttcaacaggcctaggcctgggcctggtccttgtgagattgcagggagagggcggggtttgactgggcgagggaggagccagagtgagtgaagaagtgggcccaagagaggtcccgggtcgcacctgcgcaaacagcgaggcctgctcccgagagtggccgaaggggtcaatgtgccargccacacggggtcgcccatcattgccaaatgtgtcctccagaaagcgcagcccaagtgtcatctggtccacgatggcaccgtagtgggtggctgcctcatcgttcatcacccagccaccaytggcgaactccargcgccctgtgccaggacaggcaaggtcagggtcagcggtcagagccaggagtgggagtagggtgggtgatactgggaatgtgaaagcctgcctgtgtacacatttctggcggaaggacaagaggggtcgctcccaggccatagttcccagatatgggaaagaggccccctgcatggcaggcttcccagaggatgcacagcaggtggggctttgtgggatgtataggaggtctccaaatggagagtccaggcaggcggagcgacacgcatgttatacagcttgcacgtggcatgacaaatctcagaaaccagagatgcagaagcagaagctgggctgggcttcctcttttcacttccttggggtaggctcaccctggcgcacaaggtctcgcacgacttcctgtgtggcatttgtctgctggtgccaccaacgggagaagaaggcaatctccacgtaaatgaagcgacgggtgggatctgccagcaaggcagagatgaccgagtccaggatgtactgcacaccggcgtgctggatgtcattcttgactgtggataacagggataaggctctcagggaacagcagagccaagggggttattcctagacagaggagcccaaaccctggatattagggtagcactggccccaccctaatgtccaggacccagagggattacagggaccatggggatcccagggaccagtccccatcctctactcacttccataaaagtactggtccacggttttgagccagcccacgtcatcawgtgtgtgaggcagcaggtgcacgttcagcatgttcggctgcactgtggggcatgtctgcacagggaccccaaacacacataccttgtcaataacccccgaggtcgggggctgcagagtaagtcttgatctagaggtgagtgactcagagaggcctgatctcgcctatgtgcagaggaggccaggccctcccaggcaggacacacacatacatagttgtgctcatagatacaactccactttgcacaaccccacagggcagctctcattcacactccgggaaaataataatagaagtagctgatgtttgttcagcatttgccgacagcagacggccaccgtgggaggkggggtgatgttatccccagtttccagatgaaggcactgaggcttagagaggataggtgacttgcccaacgtcacacactcaggaagtgtaagagctaggctggaatttcaggcagactccagagtcccagctctcagccagcacctccccccacacatacactgctcaccccctgccacctcctgcccctccaatcccacagttaagtgcagacaaagtctaggcaagcatcccggagacacggaggcaggtacaatcagacacagtcctatactcagatgcgcacagccagacctcgcaatgacacaaagcacgcactcagaccacactgtcatatcatcagccattcactagacacccacaggacagacccacccacacctctagactgtattctgggtttcactctgcctcctgtacgtttcagctcggaggccccactcacctcgtatcccccggcccgagcaccggcagccgccagcaacaaaaggaaaaagcagagaggcgggagcggtggccgcagggcgcgggacatggtccaggggcctgctgagtccaggcagccgcgagcgcagacccccgaagcccgcgcgtaggcgcccatggctcagcagcttcctcctggggttccccggccctggaaaggccgggcaaacgccccgcccccagacccggccgggccaatcggggtggggggcggggccagggcgcggtctggaggctcacgggagagaggctgtagccctgggcaatcccgggggtcgttacaggaaggtaggaaaatgccaccctcagggcactggttgggctaaaggtgacactggcgtctcacgggctatgaagacggaatgcctcttaatgccggaattccaagacggaatgcctcttaatgccggtaggagcagaagtgcttttcctaagggggccgggttttccyagccggtgtagtgtgtccatgggaatccagggtgtccgtcccatggaccttcagcgctagggtcctggaaggacctagcttgcctaagaggaggatctgatgaagagtcctatactgtggggattgggacgttgggtaaatacccctggagtaccagggatgggatccagcctggttgagaaggatccctgggtgttccggagagaaaagagggtctgacaagtggggaaggaccccgagtctttcatgcctttcccaattcctaccagttcattctctgataagaaaacaaagcccagggcaggcgcagtggctcaagcctgcaatcccagcactttgggagggccaggctggtgaatcacttgggcctgggagtttgagaccagcctgggcaacatgggttgttttgtagagacgggtttgaaaacacaaaatttgtaattttacacaaaatgtaaaaatacaaaaattagctgggcatggtggcacatgcctgtaatcccagctacttgggagactgaggcaggagaatcacttgaacctgggaggcggaggttgcagtgagccgagatcaagatcatgccattgccctccagcctgggcaacaagagcaaaactctgtctcaaaaaaaacaagaattaactgggcatggtagcacgcatttgtggtcccagttacgtggcaggctgaggtgggaggattgcttgagcccaggagtttgaggctgcagtgaacatagattgtgccactgcactcagcctgcatgacagatcaagaccattttctttcttaaaaaggaaaaaaaaaaaaggaaaccaaagcctagattatctaggtcagcagggccatctggtgagttgccagagggcagaagtcactgtcttgtccctagcacctgacttaagacacaaggtttatgaagtaagcaaatgaacagccagaagcctccagactggggccccacaccaggcctatggggctagagcccttcccgccaggtaggaggaacaccccactgaacagaagaggctgacagccagagtgaaaaactttattaacaacaggtttcaacgagaaagcaaatgaatacccctagaaacatggacagcatctcccccagcagcaggcaggggaagggaggcaggaggggtaagcctagggtkttccctaggaaagggccaggttccctctatcmagctgggggcaccgagacggcctcattcagggaagtccaggatggcagctgaaggcagcaggtttagcagccaaagcccaggcctagtggatagacagggtccaaaatgtgacccttctaggctgrtatcaccatggggscgtcatgggctgaggattctgcagataggacatcaccacggcagagatggacagcctgagacaggagagaggtgtcagtctaggatggscaggctggggtccccccaccccttactcaagagtcacttgttctgtagggcaagtctcacatgaagctactcatcatttgcttcgtgtcctccgagctccgagagttggcaaagctgatgaaggagcagtagacagcgacccaagcacaccacttcagctagggaaaggtaagtgggtgggcaggttagtgaaaggcacaacaatgagtccccgaagccacctttccagacaccagatcatgcccactgattccatctgatgcagctgggaccttgccccacccggaattcctcagtcccacctgctcatggcatactctagatacgtggtttctagtcctactgtctggcctgcgtctctcaggaccaagagagactctgacatcccacatgcttaagaccctgccctttttccacaactcctctccaagttgcttcaaagcctggccccactcgcagaccaatctgccacatccccaacctgactcgaatccttgacttcaccaaagactggggctttctcggcccagcgtcatcgcagccccactcccggccgatctcaggtcccgccccatcagcaatgacaagacaccccgcttcattccaaacccgcccccgggcctcgttctcaggtccaactacacccatagaagctcaaccccgcccaccttaagcatgaggccgcacatgctgaagatcatgcccagcaggttcatgtagtccggcgtcgggtcgtccarggccgggttacattcgctcggcgggggcttgtacctgcgacaggctcgagggtcaggggcgctcaggtcctgcccccgggatagacaggcgcttcccagggccccgatccacacccacaacccgaacccgtgcccacgacgctggggtcctcacctcagcactttgttcggcctccgtgggtccgacatattgttagtgsacatagcgagtcgaaggccagatcacgcytcttccgctgcaggaatcgcagcttccggcgtgcaagctgagggcggattttagagtaacacccgaggccctcgcatttccgttcctcatgacagaggcttggactccccttacccagagaacggagatttagsagaagccagaagtctycctttcaaagggaaaatggggaaaagaacctgaaagcgggcttcaatagttccaacccgatcaccgaaatgccaaaatgatgaacccggaagtgataaacaggaagtaggtcaggaagaacaataataaggttacacccaagcgtgggtttctaagscgcggaattttccgtacagaccgatttaaggctgcaaggaaggagtcctgggagcatggctttccctgagccaaagccgcggcctccagagctgccgcagaaacggttgaagacgctggactgcgggcagggggcagtgcgagccgtacgatttaatggtgagygccttcgtcttcattccgggtcctcctcccgcctcctgagatcgacggcccagtaacccccgcctggtgttccmcagtggatggcaattacyscctgacgtgcggcagtgacaagacgctgaagctgtggaacccgcttcgggggacgctgctgcggacgtacagcggccacggctacgaggtgctggatgcggccgggtgagccggggaccaggctgggatgggagcgctgaggctgggatccgaggtcgatgctgatcctcctcctcctttactccagctcctttgacaacagtagtctctgctccggcggcggggacaaggcggtggttctgtgggatgtggcatcagggcaggtcgtgcgcaaattccggggccacgcaggggtgagtgaaagcctggagaccctcatttgagtggaggggacccgtattagcgcataggtggtgacacggccacccccattacaccgtaaggatcccttccccagatgacgatcccccactccgcatgccaggctaggcagtcaccaacccctgtccttgctgttcccccaaaacctttcacctccccttcgcccttgctttaaccgacactgggaaccctgcctttatcccagtcctccaaagtccagcctcctctgartggcaataactttctcagaaggtgaacacggtgcagtttaatgaagaggccacagttatcctgtccggtgagtctggggcctaagcacgggggcccagggtgctgccctccccctccaaacctgacctcaccatcatgctggcctcacaggctctattgattccagtatccgctgttgggattgccgctcacggaggcctgagccagtgcagacgctggatgaggccagagatggcgtgtccagtgtgaaggtgtcagaccacgagatcctggcagggtgagtggagccaggacctggtctcaccccaggtgctacggggaatcatagctgcccccatgctcagattaaaacctactctcagctgggcacagtggcacacagctgtaatcccagctacttgggaggctgaagtggaaggatcacttgagtccaagagttcgaggcaccattgcactccatgctgggtgaaagacagactgtctacaaaataataataatctggccgggcacggtggctcacacctgtaatcccagcactttgggagrccaaggtgggcagatcacttgaggtcaggaggttgagatcagcctggccaacatggtgaaaccccgtctctactaaaaatgcaaaaattagccaggtgtggtgacgggagcctgtaatcccagccactcgggaggcggaggcaggagaatcgcctgaacccgggagttggaggttgcagtgagcygagattgtgccactgcactccagcctgggcgacaaagtgagactccatctcaaaaaaaaaaagataaaatgatttctaaaaataaataaaaataggccgggcgctgtggctcatgcctgtaatcccagcactttgggaggcagaggcaggcggatcatgaggtcaggagatcgagatcattctggctaacacggtgaaaccccgtctctactaaaaatacaaaaaattagccgggcatagtggcaggcgcctgtagtcccagctactcrggaggctgaggcaggagaatggagtgaacccaggaggcagagcttgctgtgagccgacatcgcaccactacactcctgggcgatagagcaagactccgtctcaaaataagtaaataaattaaataaataaatacataaaaataatcataaggaagaatttttgttttttttgagacgcagtctcgctctgttgccaggctggagtgcagtgacgtgatctcggctcactgcaacctctaacttctaggttcaggcgattctcctgcctcagcctccctagtagctgggactacagtcgcgtgccaccacgcccagctaatttttgtatttttagtagagacggggtttcgccatgttggccaggagggtctccatctcttgacctcgtgatccacctgccctggcctcccaaagagctggaatcacaggcgtgagccaccgcgcctggtggaaaaaatatattttctattcattaagtggaagtgaagagatcgtcataaagatcttcgtgttgagaaagcagaggaggaggaagaggagggattgatcttggtgtctcacagctgatagaggcagaagaaaatccacatataagtggacgcgttcagttcaaaccgtgttgttcatgggtcaactgtactttgaaaagtgctccctctggtggctgtggggggtgcagggagaccagaacagtctagatgctggtgctgggtagtggggaaagtggtgggactgagtactgaggaggaggagctggagaatgcaggaaaagggggaattgggccaggtggggtggctcacacctgtaatcccagcactttgggaggctgaggtgggcggatcacctgaggttgggagttcgagaccagcctgaccaacatggagaaaccccgtctctactaaaaatacaaaattagcagggcgtggtggtgcatgcctgtattcccatctactcgggaggctgaggaaggasaatctcttgaacccgggaggcagaggttccggtgagccaagatcatgccattgcactccagcctgagcaacaagagcaaaactctgtctcaaacaaaaggaagaaaagggggaatcagaaggactccaagggcttggaaagggggtgtgggtcttggaaatgatggagtaggacgtaattggccctgggcctgagtctcaaggccagagcttcagaattccactcctgtgcactggaagagcaggcccactgggctgggaaggcacagggctgcctggagccatgtgagtgtagtcaaggttcccgctggatctaccctctcctgcagctccgtggatggccgcgtgagacgctatgacctaaggatggggcagctcttctcagactacgtgggcagtgagtgtggctggggatgtgggacaggcagggaagatggggggccaaccaggggcaccccaccctcactcacctacccrcccttcccccaaggccccatcacctgcacctgcttcagccgggatgggcagtgcaccctggtgtccagcctggactccacattgcggctcctggacaaagacacaggggagctgctgggcgagtgagtccttgtggtcgtggggatccccttccctcctctcccacccctggagaggaccaagccccccgatcctgtccacccttaggtacaagggccataagaaccaggaatacaagctggactgctgcctgagcgagcgtgacacacatgtggtcagctgttctgaggacgggaaggtgttcttctgggacctggtggaggtgaggtgcccccagccctacttcatacctagatgcctgccccatctcagccctgtccttacctcagtcactccagggcctgaaggctaggatcttttttttttttttttttttttttttgagacaagtcttgctctgtcgcccaggctagagtgcagtggcgcaatcttggctcactgtaaactccgcctcccaagttcaagcgattctcctgcctcagtctcctgagtagttgggattataggtgcgtgccaccacacccagctaatttttgtatttttagtagagacagggtttcactatgttggtcaggctggtcttaaactcctgacctcatgatccacccacctcagccttcccaagtgctaggattacaggcgtaagccaccacacccggcccttttttctttttttgagactattgcccaggcaaatgcagtggcgccatctcagctcactgcaacctcttccccccagggttcaggtgattctcatgtctcagcctcctgagtagctgggattacaggcccctaccaccatacctggctaatttttgtatttttagtagagacagggtttcaccatgttggccaggctggtctcaaactcctgacctcaagtgattcacccgcctcggcctcccaaagtgctgggattacaggcctgagacaccgtgcccagcttgggctagagagaagatgaggcaggaagggcattccaggcaaagggaacagcatatgttaagaggtgtagcctgcgcatgcatcagtcaggaaacaaaggcttcagggtggcggcaggtgcggcaagatccggggtcaggctgggctgcagatgccaggccgagcaactggcactgacccctgggcaagggggagccgacggccatgtctaaccttgggtgagatagggctgcagtcattcaagaaactggagctacatcttagcatccctgtgcatggtttcaagccctgagccctgtccttgacatgtcccagcctggtggggagtcaggccagaaacagaccatcctggtgtagtggggtcagagccgggggaatctcggcaaaggagacatcagcgctgggcttggccaggggaactaaggcccataagaggatggagggaaccgggggggccctgaagacttggcggacaagctcttgctttaggaactaaggtagcaagaatgttccacctatttcttatgggcccagtagaacagaagttgccttggagggcaggcacatcaagggacattttcaaggtggaaagaggaagcatggcttgcttgaggaactgtttacattgtgttgggaccaggggaagtggggatcattggggctgccaaatggacaggatggagcccagctggtggcagggaacaggcaagctgtgagcaaggcatgctccaaacatggtagtggcagaaaatcagcagtctctggacatggtctagaagcagagccaagaggaataactgatagaggaacatgtggtacaagaaaaagactcccggccaggcatggtggttcacacctgtaatcccagcactttgggaggccgaggggggtggatcacgaggtcaggagatagagatcatcctggccaacatggtgaaaccccatctgtactaaaaatacaaaaattagctgggcatggtagcgcgtgcctgtaatcccacctactcgggaggctgaggcaggagaatcgcttgaactagggagtcggaggttgcagtgagcccagatggcgccactgcactccagcctggcgacagagcaagactccatctcaaaaaaaaacagaaaaagaaaaagactcccaaagccaggcatggtggctcacacctgtagtcctagcactttgggaggccaaggcaggaggatcacttgaggccaggagttcgagaccagcctgggcaacatggtaagaccccatctctgctattttaaaaaataaaaaatcaataagaggctcccaagacttgcggcctgaacacctggtaggacagagctactgaggggctcagtctgaggtagattaattttgcagtgtctaggaggcaattagaggcaggtggctgaaggtcggggagaggtgactgagggcttcaggcaggactgagatggggggtgcccagggacctcagaaaccagggtacagcccagccacagataaccactccctacccctcgctccacagggtgcgctggctctggccctgcctgtgggttccrgtgtggtgcagtcgctggcctaccacccaacagagccctgcctgctgaccgccatgggaggcagcgtccagtgctggcragaggaggcctatgaggcagaggatggagcaggctgaagccaggggacccaccaacaggaccaaggaccgagacacagacatggaaggacttcagataccatcttattctagagacgtagctgaccaaaaagtaggggaggggctgggtctgcmaattaataaatagaagagggggtaagaccttcctgggaccgcagccgctcagtcctcgttcttctcatgcatgaaggcatccatcttctgggcaaaggtttcagccacaagcagggggaagaccagggagrcgtcagcatagacctgggtaggggggaacctgggtaagccatgggacccacactcatcgtcccagagaccctatgccccacccagccagcgcttaccttgacgggctgtgcatccacccggatcttgccccaggagacagcctcgtctggtcgggcacctgagtcagagccatcaaactcctgggctgtgttgatgtaaacagcgtagtcggccccgttccgctgtggggaggcgggggcacggtgggcccagtcagccagtcacaggagacagacacagagggaggacaccgtagccaaacaggctgagaggtgtgtcccagatgaaggaagcccttcacagacattcgctcccagacagggcccatgtcaatgtctggggtcactagagctgctgggcaacgatggctgtgtttccccagacccaacagccaggtgtcaacaaccctgccccatctgcaaggcaggagctgccagcaactctatcttcagaagccctccaaatccaaccaccgcctgcctcctgatccctgcatggtcaccactgtcctggactggagttctcactcacctgccaccatctgttcaccacatggccaccagggggagcatgggaacccgagtcaagtcctctcccacttctctcagtgcaaaagccaaagccccgcctcagcccacagggcccagcaggctccctgtggcacctccctgcatcacctcctggccctcaccactccaccttcccctcaccaggtacccagctgttcctggattacttcaggcgccccagagcctttgcaatggctgttccctctcctgggaactttgcaatccagaagctcaatgctagtacagcagcacaaactcctggcacgggagacaaccacatagctcctgggagatgcctccccaaacccctgctcccagctcacacttccagaagcctccttccaaaacctcttgttggacagcacccctttctcttctcatgccatcatttagtattccccgtagcaatgactgccccctgacgtggatgtcacttgtttgctatctcccctactagaacatcagtcccggggagcagggatcctggcctgtctagttcatgctgtctacccagcacatggcataggcccaccacacagcatgtctgcagagtgggccgaagcgccacccccactcaccatgaggttggcattggcaatgtggtgcttgaccacgcccccgcccagaatgatcatcccagtgcacttggcaaagatggcctgtgtgttgatgagcctcaggtctgggggaagagcgccgaagtcaggccttggactcagccagccctccttcccctctcctctgtggccctagmgcctcaccctcaacgatgtccaggaccaggcccgggttcttgtaggaatggaagaagatcatgtcgcccagcgagccgtctgtaagtgcgggactaaacacagggatgtggttctgcagagaacatgacaggacagtggctggagctcagagcctcgtctccatgctggctatatgactatctgactgtggatggggtgcctaatttctctaggactgtttcctcaattataagcataacagaaacacctctcacagatgaggcctatatgagaaaacccacagaaaacacttagtatagtgcctggcacataaagaaccagcctattcttagcttgctgagctgtttctctctctttttttttattccctgagacggagtttcactcgttgcccaggctggagtgcaatggcactatctcagctcactgcaacctctgcctcctgggttccagtgattctcctgcttcagcctcccgagtagctaggattacaggcgcatgccactatgcccagctaattttgcattttgtttttttagtagagacagggttccaccatgttggccaggctggtcttgaactcctgacttcaggtgatccacccgcctcagcccccaaagtactgggattacaagcatgagccaccgtgcccggccgtctaattcttttttaaagagccagcttgtggccgggcgcggtggctcacgcttgtaatcccagcactttgggaggccgaggcgggtggatcacctgaggtcaggagctcgacaccagcctgaccaacatggagaaaccctgcctctactaaaaatacaaaattagccaggggtggtggcacatgcctataatcccagctacttgggaacttgatgctgaggcaggagaattgcttgaacccaggaggtagaggttgctgtgagccaagattgcgccattggactctggcctgggtaacaagagcaaaactccgtctcaaaaaaaaaaaaagagccagcttgtgcaacatggtgagttcccatctctacaaaaacaattagccaggcatggtggcacgcacctgtagtcccagctactcagcaggctgaggcaggagaatcgactgagcccagaagctcaagacagcagtgagccattattgtgccattgcactccagcctgggaaacagaatgagaccctgtctcgtaaaaaagaaagagtaagtaggctgggtgtggtggctcacccctgtaatcccagcactttgggaggccaaggcgggtggatcacttgaggtcaggagttcaagaccagcctggccaacatggtgaaaccccatctgtagaaaaatacaaaaattggccgggcatgatggtgggtgcctatagtcccagctactcaggagggtgaggcgggagaatcacttgaacctgggaggtggagggtgcagtgagctgaaatcacaccattacactccagcctgggcgacagagcaagactctgtctcaaaaaaaaaaaaaaaaaaaaaaagactatgtagctttttttttttttttttcaggttctgattctctaattaaagggagtgggtagctcttattttatagcatctgggagtgtgggaccctgagccaggccccaggagagttgctaagtgttgcctctactgttccagagatagtctgggaggagcataaggatgctgaggccccactagttatctgtgtgacttcagacaaaattacctagcctggctgggcacagtggctcacgcctgtaatcccagcactttgggaggccaaggtgggaggactgcctgacgccaggagttcaagaccagcctgggaaacacagggagacccccatctctacaaaaaatttttaaaattagctgggcatgatggcatgtgcctgtggtcccagctactcgagaggctgaggtgggaggactgcttggccccaggaggttgaggctgcaatgagctgtgatcacaccactgcactccagcctaggtgacagagcaagatcctgtctcaaaaaaaaaaaaaattaccacgcctatctgtgtttgagtctcctcatctaagagtgaggatgctgagaataacagtactgaatccccaggaggctggaaagatgaaataagttaacacatgccaaagtctggctactttgctcccgcttaggtcctcaccttctgggcccagtaatacacsgactctgggttgttgatctccttgcccagccgggcgatcatcttrgaaggcgtccactttacaccctaggagaggatgtgacyttcaggccatgcctcccctgactcccactgaactggcccctccaggttgccccagccccacctctgtrttctgctccatcaccatctggtccagaatgggcatcagccagtcctcaaacttgcagtaattstcattgggcaccagcaggtttccgatcctgagaacaggaggcatgtaggcatcaggccccaggacccttggtccagctcccctgcccaacaccactcagggttctcacctattgatcccgttctcccggagctccttccccctgaggctaaactcgcccaagtatgtgggcgccaggcacttgatgaggtcttcctccacgccgccagctgtggtcaccaatacgtccacctgcagccacaaggcagtgaatttggcccaagaaggaagcccctgccctcattctgggcagaacttctaacctcatccttgtccagtgactcttatgagggagctctgctacaaaacaaaacttgattctattcctctgcttataacagacccctatctgcccatctcacttaaacgatcaataactgcattgcccattgacccagaggccaaggccacggcctcaccaggtccccaccatgttgtgctgcacaaggtagcgaatggtctcacggatgcctgaactgatgaggttggatgtataycccagraaaatggtgcarctggtaagtggscggcggctctgggtcaggtccscgtgctggtcttcatcctgtgacagtggttccagcttcttctcgatctgtgagtaagggccaagtcaagttaagcactggccttaaatcccagactcaggactccaggtgggctccagaaacagatttcaccccaggccctgcacattcagggatacaggaccagttctacaggggaccaaggaacatctcctgtgtaaactctgccccttcccagaccagatctcaagacacacgttcaggatttgcccccacccttttttttttttttttggacggagtttcactcttgttacccaggctagagtgcaatggcgcgatctcggctcactgcaagctccacctcccgggttcaagcgattctcctgcctcagcctcccgagtagctgggactacaggcgcgcaccaccatgcccggctaattttttgcattttagtagagacggggtttctccatgttggtcaggctggtctcgaactcccgacctcaggtgatccgcccgcctcggcctcccaaaatgctgagattacaggcatgagccaccgtgcccggcctttttttttttttttttttgagacagagtatcgctctgtcaccaggctggagtgcagtggcgcaatctcagctcactgcaacctccacctcgcgggttcaagcgattctcctgcctcagcctcccgagtagctgggactacaggcgcgcaacaccatgcccggctaattttttgcattttagtagagacagggtttcaccatgttggccaggcttgtctcgaactcctcttctcttgatccacccgcctcggcttcccaaaatgctgggattataggcatgcgccaccgcgcccagccagcccccacccttttaggaatcagagagcatctcctttcagatccggtcccttccccgctgggaaaagcaaatctaaattcaagaaccgcccagacttaggctcctcctcccatatcctcccttaatttgtcttgccccaggctccgcccattccagaaagctttaaatgtacctagaacccgcccccacaccaagaatcagtcctcgcctcctcaggttaccgtaccagcatgtaactaccagagtgcaaaatccccttcccaggacagaaactcccgcccagaataggtcccgccttcctccaactattgggcaactcaaataaaagacatatcccctccactggaaacgctgcccccgtctagtaccgcgttggttctacaagccacgcccctccgcgtccctagaaattccgcccggtcctcaccatrgcattgacttgcygtacagcgcgcccgaagttggttgcttggaagccggtggtgccgaaggcctccagcagtgcgcggtaattcacaccgcggttgaagtcgtagccccggacctgggtgctttcgggcggcaacgtcgagctgtgctttagcacggcggccagcgcccccgctggcgcctcccgttccagggaaccttccatgcgcctatagccggctctcgagtcaaagctgcccctaggccgggcttacggcggcccagaaacgcg

SEQ ID NO: 93663 - DNA, 47776 bp, Homo sapiens
gtatttttaatagacacagggtttcaccatgttggccaggattgtctggatctcttgaccttgtgatctgcccacctaggcctcccaaagtgttgggattacaggcgtgagccaccacacccggccccaaggtgttcattttcaaaaggaaaatgcaaggtgcaaaagtctatgtggtgtgttacaattagtctatgcataagcttacagtggctctgcaaagacctaagaacctgttaacactgctttgatggagcggaactggaggcctaggggacaggagagacttcattgtacatactcttgagttttgaactgttggtatattatctttttttttttcttttgagatggagtctcacttttgtcgcccaggctggagtgcagtggcgtgatctcagctcactgcaacctctgcctcccgggttcaagcaattctcctgcctcagcctcccaagtagctgggactacaggcgcatgccaccacacctggctaattttttgtatttttagtagagacagggtttcactgtgttagccaggatggtctagatcgcctgacctcatgatccagctgcctcggcctcccaaagtgctgggaatacaggtgtgagacaccacatccggccatgtgttttttaaaatatgaagttaaaagataccatcaaaatattttttattcaagggtgtagaatcaagatttcaaaatggtatgcctcatcattcatcactgtaggattctgaagacatctgtggtttgaattgaccattctaaatttttgaccacctttaaactaattattaatcattagttttctcatcataaacttctgctgatagttaacattttggccaagctatttggaactcaaccccttcaccatgtcaataattgcgaatttttattaccattcaccgaagtttattcatggttttggttttttgttttttgtgtttcttttggcattttcattattcccaaactctctggttttccagaaaatgtagtgctgccctctgctggctcttatgataatgacaacctgaaaatgtctcccatgacttttaggctgttggattataaacattgcttagagatattattcaatgtatctatctgttaaataaatcttccttataatatagtttcccacagtcaaggcagtcacaacataaaatcagatggagaagaaatagcactgtatagttctattaaaaaattgacctaggggctgggcattgtggcttatgcctataatcccagcactttgggaggccaaggtgggtggatcacctgaggtcaggagctcgagaccagcctgaccaaaatggtgaagccccgtatgtwctaaaaatagaaaaattagccaggcatggtggcgcatgcctgtaatcccagctactcagggggctgaggcaggagaattgcttgaacctgggaggccgaggttgcagtgagctgagatcacaccactgcactctagcccaggcaacagagtgagactccatctcaaaaaaaaaaaaaaaaaaaaaattgacctaaaattttttgatcatttgagatcagcaattcccaagcactgcttttgtaaaactactatttaaaaaaatgtatcaaatgttagccagaccccaaattccctgttaagattaaacggtttccaatacttgaccatctcttcactcaacatactaccctcatcccagtatttacctgcagcatgagaaccaatcagatttccaaatccaagtaaaatattccgcctctacaacccagcacctatgaatcttcacagcaaagtcaagtttttctgggaagcctgggaaccagttacctatataatccccctcccaggacacagtgctactccaaatcacattcccaacacttaaaagatggtttctttacatcatgagtcattattttaaatttgtaacctgttaagtagttgtaagtcatgccaaattctgggaagccctccctcctctgggttaggtgtcttctagcagtgtcacacatctcacatcaagttcccagtgcaaagatgctaggttacaacaaatcacatcatcaggcactgctaaggacatcacaagtgggtaaagttgcactacaattttttttcttttgacaggaccttgctctggcacccaggctggagtgcagtcgcacaaccttggctcactgcagtttcaacctcctgggttcaagaaatcctcccacctcagtctcccaaatagctgggaatacaggggtgcactaccatgtccagctaatttttatattttttgtagagacaggatctctccccattgcccaggctggtatcagcctcctggtctcgatccagccacttcagcctcccaaactgctgggattacaggcatgaaccaccacacctggcctgcactgcaattttctaacaacaatgccaaaccaaatttggggtatttaggaatcacatattcatttaattccttcccccaaaatgaaaggaatatatacaccaccctcctatgtaacatactcaagagccaaaggtaatctttcaatcttttatttaaatgccatgatccaggatggattttagatcttgttgaaagcagccacatccatggactgcacatagtcctcaaaagcagtgatctgctcctccagcatatctgttccaactttatcatcttcaactacacactgtatttgaagtttcttaattccgtatcccactggaactagtttagctaaaaagagcattaagaaaaatcctagttagaaaagtcttgtaggaaaggttgaaactgtaggcaaattccagatgttagtttcaaaaaaaaaaaggcaaagcctaaactcacatgagccccagactaagccgtctgcttgaatgcttctgacrcactcctctaatttcgccatatctgtctcatcatcccaaggtttcacatctagtaagatggaagacttggcaacaagtgcaggttctaaaaacaataaacagcattattcaaataatgaattgtatttttttcaccctactccaagacacaaacaaatccatctcaatttgttttgagactatctccttagccaaacaaaactacagatacatcttgtgtctgtcacacatatatacccactttctgttttgctaagaaagaggtgtttgtgttaacagtttctttcccacagaggaatgccacaactgctaccataagaacagctgcagaccagtagctgtggaagaacctgtacaggttttaaaatattgacctattcaaggaatgtggaggaaattacttcaaggtcaagctttgaaaaagattacttacattaacatgaaatgaagttaaaaacaaatgacctacttttggctttctttgattcatattgtgcaagacgttcttcccttagcctctttgcttcttcactttcctgtaaagaaaaaaaattaatccacttcagaaagctggttgttcctctgcttaaagctagtggggtcatcacaaaaaagactggcttaatcagaaaaaagcaaatccatcacgaactcagccgaaagatggtgatttgattttattcatcatgcaaccagtcagaatttgaaaaaggcatataaattaaagccaggattcaaatccaggcaatttggcttaaccacattgatacaattgctgatcgatgtattctttttttttttttttgggacggagtctcgctctgtcgcccaggctggatgcagtggcacgatcttggctcactgcaacctccgcttcctaggttcaagcaattctctgccttagccgcctgagtagctgggattacagatgcctgccacatttttttgtatttttagtacagacagggtttcaccatcttggccaggctggtcttcaactcctgacctcgtgatccacccgcctcagcctcccaacatgctgggattacaggcatgagccactgcgcctggccgatatgttctttatagaagacgccatacctcctcatcatcagatccaaagaggtcaatgtcatcatcatctttactatctgtagctccacttcytgtagtgtcttccacatcggcaggaccatatttgcccaaagctttcttcactcctggcaggcttgaaaaacatttaaattcaaccactattgagctagtataacatccttttccagaaaatacaaaataacttgttttaatcactacttatcactagatcccttttgcaatcataatttaccctttcacatgcgcccaggtaaacactgtcatatgttcaactcctcacccgacaagcattagtaccatgtgagacattattttcaatactcactatgatttactctttcagtatgaacatttctgtttgagatttcattaagtatgctcagttccattcttagtgaactggagtccacttccccaaacttccacccttgttggcagtttcagaagaatggccaaggactgaatgaatgagccaccctctcaccccagaggtgggccccccaggtcaaggtcgaggcacattggcagggcagtgtggggaaaagttgaattgctgctgtccatgttctacctgttctgtgaaaaaatggagggcttcagtctcttggccttctaaggttacagaaaaatttagcttacaatatcccaacaaaactaaagtagcctgggtccagttttgtcatgtgaacatcctgataaacttcgagagcagtcttattcttcagctctatacaaagrtgattttacctggccttttccttttcgtaagacttgatgtgattataccaacgtagggcatgacacaagtcggcaggcggtgggctggacacggcttcaaatactgccacatctgcttgtgatggcacatacctgccaaggacacagaaacattcacacacacctttgaaaaacaaacgccagcgaataaataataaataccgtatgcatcacattaattagtgggcactaaccccagcagggttgctttaatgcttttcttttcttattagctccttcaaatcaaaccatatgtttgggtcaccgcgctatcctgagaaatgtctgccactaagtagacctcaaatactgcaatgtctggcgttgctctatctacagcttaacatgtattaactgggcagcgatgcggaaacacctggctgaattaagtgtaaataaagcacattttaacctttccttgctcgtgaaccgctccccggaggccgggctcgccccacacgagggccttgggagacggcaacggggcgctttcccctccctctcgaaagggccccggggcccggcctccctccctcccgcggcagccgacacgctgcgccacgtggccccggccccgggcggagaaacctccccgccaccccgactcagcccgtccgctcacccctcgatgtagctcttgtccgccaggtaatcgttgagcacctggaggccggcagggcttttcaggtctccgaaacccatggtgtcggctgtatccgagagctggggagcagcagaaagagagcgcgcaaattgtgggcgccccacgctgaagagaggaaaaaggacccgaagagaccggaaaattccttatatagagacggaggcgtttccctccaccgcgccggaccgaaggttaaaggtcaaagtacttttgcattcccacttctccacgtacgaattgggggccctgaattaaatggcccacaaattgtccatggacctttcgttgcgtttggaagtaaattaataaaataggcatgtcttaagttcgtacctccacggctcccgaagatgacgggaaccagccctagaagcgccggagatgaccgaagacgcccggcctcgaggctggggccacttccggcggaactgcgggtccaagttgtccttcccgcctccgggctgggccgacctcagctccgccctctggtcggctgacggaaattgccgacaaacttgtcgaatgcaaggattctagtccctccgggctttccgttctccaggcccggctgacagagttagccgaggccgccatattgaataagcgacccggcctcctagggggtcgtcgtggtscagacagtttagcagaacagcctccgcggctccggggagaaggtgaggtcttgtatggatgggaagggtgaggtgcgtcggccagaggcttatttattgacgggactgtttcctttggcccacgcgacgtagtcttctgttgtccttgactgggcgccgcctcccgccccgccgcctcrgaagcccctgagagccggcagatggggggcttttagccacggtctctggtctgatgaagcagaaaagaagatgaggatcagggggtcctcgggaacgctgtcacgaatgtaggcttgcaggtgaccttccctctgcagggaaaattcaggacatttccctctcagaggaggaggccgttttattccccgggagaggaccagtgtccgatgacttaggccttaagactaagcctttccccccagatttttacacgcctgatacagtgcatgattgtttggtcgctgttgtgttagcaatggctcacgcytctgtttgttgtccttgtttgtttkgtccattgaccacgttggacagcatttttttattcctttaactaacgggaaattgagaaaaacgacttttgaaaagttagcccaggrttgcattgcaaataacaaaacgttgtttacaggttattgggatccagtgcttgaactgtaaggtcttggatcagacacaactctgttcacacacgaattgacggtatagaagtgtaacgttaactgtttttgatgaataaacaagttatttttgttttgcggaatattcttgttttcaccgacttaaggctgccagagcacctgcactttttaaatccgggaaagtggtctctacaaattaacgaccagaaattagagattcagttcacttaaccgttattgaacatttactacgagccagaaatgagtccgtaaagaagaataaaatggatgatatgctgggggaatcgtaaatgttagatagsctggtcaatgaaactgagaaaaggcttttaagccaagatttgaaggataaggaggggccagggaagagcatttcagtctgaggtcacagccggtggcaagaggggagaggctgtgtgggaatagtgtggaagcttggtgacctgttaagctattgaaggccggaggcggtggctcactcctgtaatcccaccactttgggaggccgaggcgggcggatcaygaggccaggagatcgagaccatcctggctaacacggtgaaaccctgtctctactaaaaatacaaaaaattagctgggcgtggtggygggcgcctgtagtccagctacttgggaggctgaggcaggaggctggcgtgaacccgggtggcggggcttgcagtgagccgagatcgctccgctgcactccagcctgggcgacagagcgagactctgtctcaaaaaaaaaaaaaaaaaaaagaagctattgaaatactccaggcaaggagtgatggtggattgggatagggtggtaccttggaaggcaagaagtaaatggatggatccatgttggagaacgtggaatagcatagtccctatatggaaaagtatccagtctagtttaagaaatgattagtcattaacattttccatccaaagagataattatttctattgctacttggcatatcaatgttcaaagcacatatcgaagtgttgcaaatctgtatttcttatgttgggctatgctttgttgctggatgtcaacagtctagttctagttgatttcctatccaaagtgagtactatttttatattgcattggagataaaaaagtattaaagttttaaaattgtatgaaatactgattgttgatttcaaatctgtcagtgctctaatggagtaagtttaggtttatatttatgccatcagtagtttttaataggacagatgctactctagttctagaacttggtgataagactgtttggtggttattttcataagggtcctgtgctaggtcttcaaaaaagggaaatgtccaaattccttgtcctcaaggagcttacagtctggtaggtactaaaattgattactaacctacagtttagtaagtaaaacaaaaatatctacacagtgtgtactggtactaaagaaaaagagctcaaagaaagagtgctttaaaattggttgtctgccaggcgcggtgactcacgtctgtaatcccaacacgttgggaggtcgacgcgggtggatcactgaggtcaggagtttgagaccagcctggccaacatggcgaaaccccttctctactgaaaatacaaaaattagccgggcgtgatgrcaggtgcctgtaatcccagctacttgggaggcaagagaattgcttgaacttgggaggcggaggttgcagtgagtcaagatcacaccattgcactacaacctgggtracagagtgagactctgtctcaaaacacacacacatactgattgtcagtggccagtattgcctaagttgaattcagctttaactggcatttgttgagcccctactaatagctcattgtctaggaagtattgttttcctcctgctctataagtaaagaaccagaaactcatttaccmaacattactcactagcaggaaacagattggatatttgcaatttcagtatcacatattcttaattaatgaaatttatgaatgaaatttcctgttgtacatcatctatgataagtatgcagaattttgtgcttaaaacctatgtatatgtactattattcaataatactattgcaactattgaaactttaatgttgaaattttttaatacgttctaatcacataatttgccttttttcttttttttttgagacagggtcttattctgtcacccaggctggagtgcagtggcatgattgtagctcactgtaaccttgaacacctgggctcaagccatgctcccaggtcagcctcctgtgaagctgggaccacaggcgcatgccaccacacccagctaatttttttttttttttggtagagatgggatcatgctgtgttgcccaggctggcctctaactgttagacccaagccatcttcctgtgatggcctcccaaagtgttgagactacaggcgtgagccacctctcctgtccaatttgcattttttttttttttttttttgagacagagtgttgctctgtcgcccaggctggagtgcagtggcgtgatcttggctcactgcaagctccgcctcccgggttcacgccattctcctgcctcagcctccccagtagctgggactacaggcgcctgccaccacgcccggctatttttttgtatttttagtagagaaggggtttcaccatgttggccaggatggtttcgatctcttgacctcgtgatccacctgcctcagcctcccaaagtgctgggattacaggcatttttaatacctttaaaagttccaaatgattttggatgctcaacctatatgatcaagtgaatagaaggaaagttcagtgcttagcctatatgatcaagtgagtaggaaaaaaaaaaaactcaaaaagtttagaagttttggtgacttggccgggcgtggtggctcacgcctgtaatcctagcactttgggaggccaaggcaggtggatcacctgaggtccggagtttgagaccagcctggccaacatggcgaaaccccatctctactaaaaaataaaaaaattggccaggcgtattggctcacacctgtaatcccagcactttgggaggccaaggcaggtggatcacctgagatcaggacttcaggaccascttggccaacgtggcgaaaccctgtctctactaaaaatacaaaaatttgccgggcatgttgatgggcgcctgtaatcccaactactcgggaggctgagaattgcttgaacctgggaggtggaggttgcagtgagccgagatcttgccactgcactcctgggtgacagagtgagactgggtgacagcaagacccctgcctcaaaaataaataaataggctgggcacagtggctcactcctgtaatcccagcactttgggaggctgagctgactggatcatgaggtcaggagatggagaccatcatggctaacacgatgaaaccccgtctctactaaaaatacaaaaaattagcctggcrtggtggtacacacctgtcccggttactcaggaagccaaggcaggagaatcgcttgaacctgggaggcggaggttgcagtgagctgagatcgcgccacagcactccagcctgggcaacagagcgggactccgtctcaataaataaataaaataaataaataataaaaatacaaaaattagcctggcatggttgtgcatgcctgtagtctcagctactctggaggctgaggcaggagaatcgcttgaacccaggaggcagaggttacaatgagctgagatcgtgccactgcactcactccagcctgggcaacagagtaagactctatctcaaaaaaaaaaaaaaaaaaaaagggccgggcacggtggctcacgccttaaccccaacactttgggaggtcaaggtgggcggatcatgaagtcaggagttcgagaccagcctggccaacatggtgaaaccctgtctctactaaagatacaaaaaattagtcgggtgtggtggcgggtgcctgtaatcccagctcttcaggaggctgaggcaggagaattgctttaatccgggcggtggaggttgcagtgagccgagattgcaccagtgcactccagtctgggtgatagggcgagactccatctcagaaacaaacaaacaaaaacaaataaaaagaagttttggtaacttttctgttttgtgtgtctttaagtcgtggtgtttatataatcgacacccatttatttcagtaattcagcaagccttttagagcagtgtctcaacttcagcactgttgacactttggataattatctttattgtgggggactgtcctgtacattgtagaatagccagcaccttgtcctctacccactagatgtcagtaacttccccttgtttgtgacaacagtgtgttcagacattgctaaatattccctggggagcaaaattgtcctcagttgagagccattgtttaagagcttactctgtgccagcctggtggataggtactgaagatagaaaaattcaaggaattaatgcagtgagggcagaacgggcttataaacacataattggaaatctgtaagataagtgtaccagaaaatagcaatcaagacacctcaaaggcttgggctggtgagctatctcagaatatctcaggarcatttagtagacagctatgcttagaacatgaaatgatagaatgggtattggtaggaaataaaagcagaaaagacaactttattttacataaccattaatgataagctcactgttagtcttgcagtttattttactgtgtggtagtgctttaagtttgatcctttcyatgtcatttttttttaaatggcaraactgctctctgcatagaattagaaagtccaaatgtatacaatagctgctgctgcttagctctttgacattgtacaagtcagtatctctgagactgagaattctcatctacagactaagtgaaaatatcagaacctatgagtgttcaatgacataatgtatgtgaaataatttaaagccataaaacattaccaaacagttggtgattgtttttttccctacaataatataattctttgttttatttttagcaatatgttaaggatacctgtaagaaaggccttagtaggcctttctaagtctcctaaaggatgtggtgagtattttcttaaatttgcattcgtggatattagaccttatttttgtaaatttataagtctatggcatagtttatcaaagaccctaaacccatgattttttaaaataaaaatagaaaccggccgggtgtggtggctcatgcctgtaatcctagcactttgagaggctgaggcaggtggattgcttgaagccaggaattcaaaaccagcctggccatcatagtgaaaccccatcactactaaaaatataaaaatcagctgggcatggtggggcacacctgtaatcccagctacacaggaggctgaggcacaagaatagcttaaacccgggaggtggaggttgcatacagccaagattgtgccactgcactccagcctgggagatagatcgagactccatcttggaaaaaaaaaaaaaaagaagaaacaaatgatctaagttgaataattttcaaaatataattttactttaaacagtttataggaattatcatggaatagaaagtattaggaactacacacatcaatgccaaaatggaaaaatcacattctgtttttgaaaagtgatcttcccatgaacatattttcagtgacattaagagtttcagtttaaagttgggtatggtggctcactcctgtaatctcagcactttgggaggccgaggcagaaggattacttgaggtcaggagtttgagaccatcctggccaatatggcgaaaccctgtctctactaaaaatacaaaaattagcgggcgtggtggtgagttcctgtaatcccagctactcggaaggctgaggcaggagaatcgcttgaaccggggaggtggaggttgtagtgagccaagatggcgccactgcactccagcctgggtgacagggcaagactccctctcaaaaaaaaaaaaaaaaaaagaagaagaaagaagtttcagtttaaactactctgctatcaaaagtagacaaccataagtttgcatccagagcaatacagaggaataataaggaatgaaaaattttaggtttgtagttagagtcaattcatccattatcatctgctataataaactgttaatctgtttttcgcttcaatatctttgatggtcagttcgaacaactgccacagcagcaagcaacttgattgaagtatttgttgatggtcagtctgtcatggtggaaccgggaacgaccgtcctccaagtaggcatacattctaactattttgtgtgtgygttctgatttttttaaaaatactaatttatttcctttatactgattattagtaaataattctttaaaataactatacacagcaaagttatattaaaattatttcattttaaatcttggcacttcaaagtgagctatcatatatttgtttgtggcatttttagtgaattatggtagttcttttgtttcacttttcattccaaatgaatacccattaagaaatttgaagtccgagcgcagtggctcatgcctgtaatcccagcactttgggaggccgaggcgggcggatcattcaggagttctagaccagcctggccagcactgtgaaaccccttctctactaaaaatacaaaaaattagctgcgcatcgtggcgcgcacctgtaatcccagctactcgagargctgaggcaggagaattgcttgaacccaggaggcggaggttgcagtgagccgagattgygccactgcactccagcctgggcaacagagcaagactctgtctcaaaaaaaaagaaaagaaatttgaagtaacttaaattagttactataggtaagtttgtgaaaaaataacctccatttgttgtgggcctgcttaatgcttttcattttcatataacctttctgtggttagtaatattcataggaatatatcctacaaagcaggtaaatggagggtagcatgtgcttacattcatgctctaaatatttcttcatattcctccagaaataataaattggtcatagagaagtcatgcttcactccatttgtaagttgtcacagatctaaatgttctttgttcattttagcagtcatttctagactatctgccagtcacagacatgaaagcacaaaatatgatataaatgtatgttcaaggtacagtgaaaagttgtggcagggataggaggtagtagaaagaggtattgggtgcctcaggtcatccctgaggaggtgttaaaggatgaacaggtgtgttcatattgtgaacaagaacgacatgcttgcatttcctatggaaaaagttaaggcagatagcttgtcatattttgaaagcttcaaatagtttaatattgatgaaacataaggtataagtagaagatgagatcacaggaaatcaagttattgaggaagggaaggtccagtcatgaaatacagtatctgctatgcagaagagcttatattttgatccatcaggagttttgttgcctatttaaacagggtgacagcgactgtagaggatgatcatttggagaatagcaagactggaataagagacaaggaaaaagcattttgtattattgggacaggatactacaaaagccctaaaatagatagtgkcaatgggaatgaaaacaagagagtagattcaagggagaatgaaatgtagacaggccttcaggaatgatgaagacccgagggattttttcccccgtcgtacagaacttcccaatattgctttaacagtgagaaaaaaaaaacacaaaagaagtttcagtagagccacagacaaatagttctttagaactcaaagagaccggaggaattcttgtggttttctgcatttgttaggttattttggagtgtatagaggggagagaaatcatttgaatttaagctgtctgtggaacatacacatgcaaatacctgtaaatctgaagcttggagaagtggaggtctaacatggctgcagattaaggtttggacataatcagcataaggaatgtcagctaggatgaaggctgggacactatctgtctttttcactactatacctgcatcctgcacaaaggaaagactcaacacatttttgctaactaaatagtttaaacactggaaattgatgagattgctttagaatgaaggctgaggatgaggaactaactctagaggaaatttgaacatgtttatagactaaaaggaggaagaaattgcagagcagggtaggtgataattggcagagcagggataatcccccttactgggcaaacagaaactgggaaaaccttcagccacagtgggaggtgagtcctgggtagcatataggagccaaagacagatagccagctagataatgtgtagtgaaatctctaatccaaaggaggggagcgaggcaaagaagaagtccaggtatgaaaccactggggacattgtggacaatggttcaaaatggatgtgggaagtcaagtcttcagcacagtggaaggatactttatccagtttcttccacataaggtgaagtcacgccaaggatcctgagatcctctgaggcagcttcagaggagacgggttagaatcaaaggcaaagaaagggactgaaataagaatgaattaagatagatagatagatagatagatagatagatagatagaagtaataagatgctgtatgtgtgtgtttcagcaataacagcagtgaagtcaggttattctaatgcttttttttttttttttttyttttttacttctaggcttgtgagaaggttggcatgcagatccctcgattctgttatcatgaaaggttgtctgttgctggaaactgcaggatgtgccttgttgaaattgagaaagcccctaaggtacttgatacctaaaattctacaccatgctgtagaaggtagaaaactttaaatcttgcagcaaactttatttagaatcaatatcgtagtggagaacctagccctctttacttctatctataaatttaattcttttgtacaattgattctcttcrtttcaaaactggaaacacatagatagaagtgctttacaaacacatgtgtcatataattgtaacatatctagaaattaaaggtgatttatagttgtcagtatttccaaatggctgtataatatataaccaggatgtagagttgccaagtagcacattaaaagtgctgacgccctgccatttttagtagagaaaagggttgcagggaagaagttcactttcagtagtttaatttcattttggtgtatgcaatttttttattcaatagtgcctgctaatcaaagcagttatttggtgttctgtttcagagcagaataaaaaattgcattgactattagaataaacctaaaaaccaggatgttttatttctgagataaatgcaaagtactagatcatcgtattatgaatatgaaaacttaacaaaattcagttttaaaaaataccctattctttgcctgttatcaaatgtataatttaatgtttttatataatttaacatttttatatattgagttgcttgtaatcacaaataaatacaaatacacatttttttttttcattgaaatcccaggttgtagctgcttgtgccatgccagtaatgaagggttggaatatcctaacaaactcagaaaaatccaaaaaagccaggtactttattgttattcaatgtagtaccctttcataaagcagaaaattgcacattttggtatttagaccttcccatagattaagaatttaatatcaaactcggaagaagttggtgtgctcagcttctaggagcaatagaagtgagtactacatagtagagaaggtgaagtcaggagtttatggtattgagctttaggatcagcattaaaaatccttctttagtaacttgctcaacttgtgaagaagggtgaatctggacttactaagctactactatactatactgggattgattgtgtttgtttttattttgaattaatgtgaatattttctgaggaccattcagcaacttttgatcattcggtattgttaaaagttacaattttctttattttttgaaacgaggtctcactrtgttgtycaggctggtcttgaactcctggcctcaggtgatcatcctgcctcagcctccctcccatagttctgggattacagacgtgagccaccaaacctgaccaaaaatcataattttctatgttctctaatgatactttattctaggctcctctaagcattttccagattgtgtgtttaatactaccagaatgatactcgggaggatcacttgagcccaggagctcgagkccagcctgggcaacatagcaagaccccgtctcttaaaaaaaatattaccacaatgatagataattggcatttctgatattaaatgtaaaattactattaattgtataacaaatatacatctatgaaggttgtttaaatggcctatatgtgggcctggcacagtggctcacgcctgtaattctagcactttgggacgccagggcgggaggatcacttgaggtcaggagttcgagaccagcctgaccaacatgatgaaaccctgcctctactaaaaatacaaaaattagccaggtgtggtggtgggcatctgtaatcctagatactcgggaggctgaggcaagagaatcgcttgaacctgagaggtggaggcaggaggctgcagtgagccaagattgtgccactgcactgcagcctgagcaacagagcgagacaccatctcaaaaaaaaaaaataaagtctataggtcattttgagtgccagcagttaatgtcagtgtgtgtgtatttgagagtcattttatatgttacaattttcatacagggaaggtgtgatggagttcttattagcaaatcacccattggactgtcctatttgtgaccagggaggtgaatgtgayctgcaggtatgtagtagaattctgtcaatctttttggttgtctcagattttaattttattagcagcatgagattgactctttcataatctacttaaggaccagtccatgatgtttggaaatgataggagccgatttttagaggggaagcgtgctgtggaagacaagaacattgggccattggtaaagaccatcatgacaagatgtatacagtgtactcgctgcatcaggtaactttttttcmttttttttctattatagaatataattgtatacttaatagtcacaatttgatgaataataacattggaaagaatggctactttttttgggtgggagaagagggatgctgtttctgatatatgaataaaataagttcactttcatttagtaccaacttcaggtggatttaaaaattaaaatctataagcatttgctttcactcataacttggtgagttgtacacrtatgatttgtacaagtttctgcctgtgtgttacacctcaattaaatgcaaacatttcattattttttattctaggactgtgctcacctttaaaaatatactcatttctttttagtgtttggaaaatcatctctttgtgatcatgaataagaaaggaaataattttgctggacttgaccattgatgacacattttttatcttgtaggtttgcaagtgagattgcaggagtagatgatttgggaacaacaggcagaggaaatgatatgcaagttggcacatacattgaaaagatgttcatgtctgaactgtctgggaatatcattgatatctgccctgtaggtgccctaacctctaagccctatgcctttactgccyggccttgggaaacaaggtatcttttattttatgacaatttgtttttttgtccttaattcattactattcaaaaaaatattaaggttcattttcttcctgggtttcagttgttttggtctgttgactttgtttgtttatgtaaaaccctttaaatagaaggtaagtagttagaatggattgaacctgtgcaaattaactgtagttttcttggaaattaattctaaagtactcaaccacaaaattatttytttcatgtgttcttccaaagagtttaatagtgttgacattttaaatgtatagtctcccatgttgttgtttattaagttttcaactatgaggaatgtcatttagccagtttctgctaatagacatttagcttgtatatttctttatgattacaaatctgtaaaaaatattgctgtttacacatttctgtgtatatctctcattctcctgattaaaccaagaaatggagtagatagatgcaagaggtgtgattatttttaaggttcttaaaacataacaaattatcatccaattttaaactttatacttttcaacttgggatttggctttttgtttctgtgtaatttctgtgtccttactgagaatctctacttgctgattcgtggttgtcatacatccccttcaatttttaaatatgattttctttggttctttcaacatattttaatattcttggttttatttttaagtgaggcttcttaggagttcccctgtgtctgcatagtttagtagtcaggtataattgtacttcaaacaccgtgacctaataagagttatgttctttgccaatggatctgtttgtggatggaggagcatattcaaagttgaggctgttttcaagtttgcccagctattactttgcactgggccctttgggtctcagagttatccaggagtttatgaataggttgagctttctctggtttcacctgcacatgtagcagcctctgttaggaatgcttgccgcaattaccactacaaacttaggctggtaaaatcttggctatcctcagctacgatgacctccaaagtatcacctccacaaacaagtttgcctmgtgctccaagttaagtgagttgtctccatctgtaccaaagaagttctcatcttcacagcctgccccggcctcgaagaaattccattttgagggggtggagaggagcataggaggagcactgagcccagccaccagtttttcagtgcataaaagcttcccacattgtatgtgtttagatttctaaactgctgaaatggtgggttttgtcatttttggccagctttacttttgcttttcagtgggaaggttttttgagctccttaatctcccatagacagaaatcctgcccctcttgttgaatcgtcccagatttggctagttggagccccttcaaactagcttctgtgtcagataatagttttaaagccttccttactgtgccaggaatttatgtgttcaaatgtgggtgtgccgggagcagtggctcacacctataatcccagcttttaggaggccaaggtgggaggattgcttgagaccagtagttcaagaccagcctggtcagcataatgagacaccggctctacaaaaaatttttaaaatgtggtgagagratagtttgagcccaggagttctaggctgcagtgaattatgatcatgccactgtagcctgggcaacagagtgagaccccagggcaaaaaaaaaggtgrggggttcttttatttaattgcagttcctctaagcttcattttttaaagtaattcagaaagggaattaattgtaaaaaaaattttttggtaaaccaggtaacagaaactttctttattcccaaaagcaccatagtaaacaccgtatgtgtttctcagaaagacagaatccattgrtgtaatggatgcggttggaagtaatattgtggttagcacaagaactggagaagtgatgaggattttgccacgtatgcatgaggacatcaatgaagagtggatctctgataaaaccaggtatatgctatattgttttccttaacttttacagtttatttaaaggaaattttataataattttgaagaattatcttttatatttgcaaattagttactgaatatagactactggaatctgagttgcttatataatgtgataatactgactttaatagtcctaggtcaatccctggatattgtatttactttgagaaagatattttttcctcccacatggagaaattcaagtagattgatacattctcaacttayttcagtttgttcattagagaaaagaagctaggctgggcgcagtgactcacacctgtaatcccagcactttggaaggccgaggtgggatgattgcttgaaaaagaagctgaatagaagagtttgcacaatataattttgataaaatatttagagatactcatgctttgtaaataaaaatgatttgacttttttagctgtcagatttttttgtgttgtaattttaagattgttcagttagctgaaagtataagaaatcaaacttttttttgtatgatttaagggaagaaatcaaactttcagatggtattttagttttaggtgaagttcataaaatctattagttcatctctaaaaatatctggaataattacttgtatctaggtgtttagatatttgacactttaaccagtactgtatttaaataacatttcttgttgatttaacttgaaaattatagttacttctttagcaagattccacaatggtgtaatttctgttttctagatttgcctatgatgggctaaaacgtcaaagacttaccgagccaatggtcagaaatgaaaaagggcttttaacctatacttcttgggaggatgckctctctcgygtagctggaatggtaaaatttgaaataaatagtgttaaatagtgtttgtgattatcaagaaacatctttgccatgaagggggggatgtatatttcttcccttttttacttttaccaagattatgatttaatctccttccattttacagacatctactgaggacatatgctagatattatgctrttaagggatataaagaccagagacacatcattcctgcatcctacaatcttgtagtagagaaagttgcacaattcagcaattattatatgcagctatgagtaattatataaggagtaatatgagtgagagcacgtaggaggaatgcctaactaggacaggcatatcaagatgccttccttggaggttgcagtgagccgagatcgcaccactgcactccagtctgggtgacacagcgagactccatctcaaaaaaaaaaaaagctgccttcctacagaaggtgattcttaaagaagaatctgagaatgaatataagcttgccagagtacaagtggagggaatagttttcttgttagagaaagacaacataaagcactagagggaaaggcagatacttcagaggaggtcgcatttaaggtaactatagttccacttcattctccagacctcattttgaagtgcctttgttcctaaatataaaacagcttccttctaagttgatgttattagctgtggccccacataacacctctgcagcttttcacttttagattaattaataattgttgtacaactttttttgtgtttttgagatggagttttgctgttgtcgcccaggctggagtgcggtggcgcgatctcgatctcgggtcactgcagcctctgcctccttggttcaagcagttctcctgcctcatcctcccgagcagctggggatacaggcgtatgccaccatgcccagctgatttttgtattattagtagagatgggatttcaccatgttggctaggctggtcttaaagtcctgactgcaggtgatccgcccacttctgcctcccaaagtactgggattacaggcatgagccagtgtgcctgggcatgttgtaaaacttttaatcagaagtctgttaactttttttgtacttgaaaacaagtactgttttattttctgaacatttcattgtggtctttgctgcgtgtaggtttcttggtgatgcccttttcatctgtttctagttgcagagttttcaaggcaaagatgtggcagcaattgcaggtggcttggtggatgctgaagccctggtagctctcaaagatttgcttaatagagtggactctgacaccttatgcactgaagaggtcttccccactgcaggagctgggtgagaaatatgaagctagratctaggctttcctttctttttttagttacaagttatgtataaaatgtgacaacctggattctccaacatatcccccagtttattttcatatatagaccaagatcaaaccagaagttgtaggaaatagaggaatccacttatcactaagtatctcaggcacagtggctcacgcctgtaatcccagcactctgggaggccaaggcaggcagatcgcctaagtgcaggagtttgagaccagcctggccaacatggcgaaaccccgtctctactaaaaatacaaaaaaattagccagacgtggtggtgtgcgcctgtaattccagctacttgggaggctgaggcaggagaattgcttgaacctgggaggtggaggttgcagtgagccaggatcacgccactgcattccagcgtgggagacagagtgagactctatctgagaaaaaaaataagtatctgaaatgttcatttaatttagaaatacttcataaaattttttgtttgagaaggcaatgggtttgatgataggagaatatttcatggattctctgtatgtcttaattttaaaktaaatttgcattttatatattgtatttctagcacagatttgcgttccaattatcttcttaatactacaattgctggtgtggaagaggcagatgttgttcttctggttggtacaaacccacgttttgaggcaccactgtttaatgctagrattcgaaagaggttggtaatagtatttattcaaggtttaaaaatatttatgtaatttttttgttttatatgtgaaaaatggcatcttcctaatagtgttagtggtagtgagactccaaaagataactggaagacaatttttttttttttttttggtgggacggagtctcactctgtcacccaggctggagtgcagtggcaggatctcggytctgcaagctccgcctcgagatggggtttcaccatgttagccaggatggtctcgatttcctgacctcgtgatccgcccgcctcagcctcccaaagtgctgggatttcaggtgtgagccactgcaccgagcctttttttttttttaatttttttaattttttagatttttaaaaaattatttttatttttawtttttatttttttgtctttgagacagagtctcgctttgtcgcccaggctggattgcagtggtgcgatctcggctcacttcaagctccgcctcccgggttcacgccattctcctgcctcagcctcccgagtagctgggactacaggcgcccgcccctgcacccagcttattttttgtatttttagtagagacggggtttcaccgtggtctcgatctcctgaccttgtgatccgcccgcctcagcctcccaaagtgctgggattacaggtgtgagccaccgcgcccggcctttttaattttttagagatggagccttgccatgttgccaggctagtctcgagctcctgggttcaggccatcctcccaccttggcctcccaaagtactgggattacaggcatgaactgccacgcccagttgcaacaatttctaataggtccgttttctcctctccttgcgagtcttttaaatttactttattagctttttattttgaaataattcaagatgcttgaaatggtctttgtataccattttgtatattgttcacatagattaactgatgttaacatcttgccatatttgtattatgattctcagtgtgtgtgtatatatatatatatatatatacacactacatatatatgtgtgtgtgaatctaattttctgaatcatttggaagtttctggtggacatggtgcccttttatacctaaattctcagcgtggatttcctgagaacaaggagcattctcttaaataatgaagaaatttaggctgggcgtggtggctcacgcttgtagtcccagtactttgggaggctgaggcaggtggatcacctgaggtcaggagtttgagaccagcctgaccaacatggagaaacccatctctactaaaaatacaaaattagccgggcatggtggcgcatgcctgtaatcccagctacttgggaggctgaggcagaagaatcgcttgaacctgggaagcgaaggttgtggtgagccaagatcatgccactgtactccagcctgggcaacaagagcaacactccatctcaaaaaaaagaaatttagtttttttggtttctgagatctcagtttcgggtcactgtatcctctgcctcctgggttcaagcaattctcctgcctcagctgcctgagtagctgggaatacaggcatatgccaccacgtccagctagtttttgtgttaggggtcttgctctgccacacaggctaaggtatattagcatgatcacacctcactgcagccttgacctcctgggctcaaatgatgctcccaccacaacctcctgagtagctgggactgcaggcatgcaccaccatgcccagctaattttttaaaataccttttgtagagacaggatctccctatgttgcccaggctggtcttgaactcctgagctcaagtgttcctcctgccttggcctctgaaagtgctgggagtaatagacataagccactgcatccagccagaaatttagttttgatacaatattatttcataagcctacgtttatatttaaatttcattgattttttttttcataatttcttttatagcaatttttttgtttcctcaggatccattctggagtcatacattacaattagtttcatgactcttctggtcccttttttgactttttttttttttttttttaagaacacaagccagttattttctagcatgctttctgtcttttaaatttacatcttagagatttataaagagggtaaccatatagtttattgtctaaactacgggagtgaaagagggaattaataattacatcaggataacagggaaaaaaaaaagcattatctcagacaaaccagactatatagtcattgcacttatgactttttggaggaactggagccatagttccctgctgtggagaataaatgtcaataacatggtatattttcatgaattatgaaaatgtttaaatatccttaatggataattaagagataattgaccctgtcatgtaaatactgcaaaataaaaattacagattaattctaaaattaaaatttttttaggccgggcacagtggctcatgcttataatcccagcactctgggaggctgaggygggtggatcacctgaggtcaggagttcaagaccagtctggccaacatggtgaaagcctgccttctactaaaaatacaaaaattagctgggcgtagaggcaggtgcctgtaatcccagctactccggagggtgaggcaggaaaattgctggaacccgggaggtggagcttgcagtgagtcgagattgcgccacagcactccagcctgggtgacagagtgagactctctctcaaaaataaataaattaataaataaataacttttatagctggcttactagcatttctttcttttttttttttttaaattttttattttgaggtggagttttgctcttgttacccaggctggagtgcagtggcccgatctcagctcgctgcaacctctacctcctgggttcaagcgattctcctgcctcagcctcccaagtagctgggactacaggcatgcgctaccatgtccagctaatactgtatttttagaagagatggggtttcaccatgttggtcaggctggtttcaaactcctgacctcaattaatccacctgccttagcctcctaaagtgttgggatttacaggtgtgagccactgcgcctggtctggatagcatttctacacagcaaattaaatcactgaattgccttggcatgcctttttgcaacactgttttgaaaggtacgtagtaaatcatatctgttaaatgtattgtctgtgcttttaacattttgtaatagtaaatagatgtatcacttaggattgatgagaccagtaactgcttagcttagttatttacttcttaaaatgttgtttttatttcagctggctgcataatgacttaaaagtggcccttataggcagtccagtggacctcacttacacatatgaccacctgggagactcccccaaaattcttcaagacattgcttcgggaagccatccatttagccaggtgctctcaacttatgtgtatctactcttgttgatttttaattattattatttaaacttaactgtttttgtaataatcctatgtaagtgttaaaacttacaccaggttgggcgcggtggctcacgcctgtaatcccagcactttgggagtccgaggcaggtggatcacctgaggtcaggagttcaagaccagactgggcaacacggtgaaaccctgtctctactaaaatacaaaccaaagttagcgtgcgcctgtagtatcagctacttgggaggctgaagcaggagaattgcttgaacccaggaggcggaggttgcagtgagccaagattgtgccactgcactccagcctgggcaacagagcgagactctgtcccacccccaaaaaaacttacaccaatacagaaaagaacatgaggaagaaagtaaaacattacctaaaattccaccaccccaaaacaggtattgataaaacatcataatctctccatttatgtagagagcaaagcaagatggatgaatagtcaaacaaaaatgagatcatactgtacatgcagtttttatttgccagagtttaattttcttgaaattatctgaaaagaaatcaaagtaaacctgaaagaattgcacttttaacttcatttaaatctwtctttattacaaaaggagttattccttaaaattttaccagtccttctatttttgtttctgaggtacatgtttttttcatttgagttctttctttaattcattttgttgttggctttattgttttgcttttccccaaaggtggctcatggttgcctgtattccttgagttcttgcttgcttgagaatgtctattcctgaagagacagcttgtcaggatgtgaaattccagggtcagacttttttttcccccctttctgagctttatagacactgccttttgttagtgaagaagcatgtaaactttattcctccgccccgccccaaaccctgtcctgattatctttttttttttttttccttggcggggagacgaagtctcgctctgtcacccaggctggagtgcagtggcacgatcttggctcattgcaacctctgcctcccgggttcattctcctgccttagcctcccgagtagctgggactacaggcacgcaccaccacacctggctaatttttgtatttttagtagagacggggtttcaccatattggccaggctggtctccaactcctgactttgtggtccactcgccttggcctcccaaagtgctgggattctgattatcattcttgaaattcagtaacttcaccaaaatatgtcttaaaggtgaagacatcactataagactataggacagaatgtactttcagtctaaagatacaaggttctctttattttagaatatatgtgtggtggtggaggtgattaaaaaactaaggagttggccgggcatggtggctcacatctgtaatcccagcactttgggaggctgaggtgggtggatcacctgaggtcgggagtttgagaccagcctgaccaacatggagaaactccgtctctattaaaaatacataattagctgggcatggtggtgcatgcataatcccagctactcaggaggctgaggcaggagaatcgcttgaacctgagaggtggaggttgtggtgagccaagattgcaccattgcactccagcctgggcaacaggagtgaaaccctgtctcaaaaaaaaaagaaaaaaagaaagaaactaaggaatttccggccaggtgcagtggctcacacctgtaatcccagcactttgggaggccaaggtgtatggatcacctgaggtcaggagttcgagaccagcctggccaacatggttaaaccccgtctctactaaaaatacaaaaattagctgggtatggtgatgggcacctgtaatcccagctactcgggagcctgagggtggaraatcgcttgaacccagaagacggaggttgcagtgagctcagatcatgccactgcactccagcctgggcgacagagcgagactccatctcaaaaaaaaaaaaacaaaaaaaaaaccaacaactaaaaactaaggagtttctgtttgtcacacaagggggtctggaggtaggcacattgaaagctgatgcaggctgggtgcggtggctcatgcctgtaattccagtactttgggaggctgaggcgggcggatcacaaggtcaggagtttgagaccagcctgaccaccatggtgaaaccccgcttctgcttaaaaaaaaaaaaatacaaaaattagccggttgtagtggcctgtaatcccagctacttgrgaggctggggcaagagaatcacttgaacccaggaggcagaggttgcagtgagctgagattgcgccattggactccagcctgggtgacagagtgagactccatctcaaaaaaacaaaaagaagaaagaaaaaaaaaaaaaagctgatgcagttgtccaagcatatcatcaaagagagcctgccttcctgctttgctgtcgtcagtgcatttgcttgctcacatgtgattgtgtgtgtccttctccttgtggttccaagatggttgcttcacttacagtctcaggtgtagggaagaaggtgatgtgcaagaggatgaagtagcaaagcacaacttgtttattttgaatagaaaaaaaattatgattaaaagatcaaaaatattaaaaaatattccgtgaaaagtcttcctttctcctctctaattcccatccccatgtgataggtgactactattttgagagaacgtttccttttctttttttcttttttcttttttttttgagacagagtcttgctgtgtccccaggctggagtgcagtacggtggcatgatctcggctcactgcaacctcagtctgccaggttcaagcgattcttgcctcagcctcccgagtacctgggactacaggcgcacgccaccatgcccagctaatttttttatttttagtagagacagggtttcaccatgttggccaggatggtctcaatctcctgacctcgtgatctgcccgtgtcggcctcccaaagtactgggattacaggcgtgagccactgtgcctggcctgagaacgttttgttctataatagatttaaatacatttttcattaattctgttaccttcattaagaactcttgatgtggtggctcacacctgtaatcccagcactttgggaagccaatgcaggcaaatcacctgaggtcaggagcaagaccagcctgggcaaaatggtgaaaccctatctctactaaaaaatacaaaaaaaccccaatttgcttggcatggtggcgtgtgccagtaatctcagctacttgggaggctgaggcaagataatagcttgaacctgggaggtggaggtcacagtgagccgagatcatgccactgcactccagcctgggcaacagagtaagaccctgtctcaaaagaaaaaaaaacaactcttgacaatgcagttgtcgaatcttcttttctatatatgtatttttaaggtctcactatgttgcccaggctgcagtgcartggcagaattgtagctgactgtagcctcaaactcctgggcttaagcagtcctcccacctaagcctcccctgtagctgggtctgcaggcatacaccaccatgcccagctaatttttatatttttttgtatagatggggctcattgtgatgcccagtctggcctcaaactcctggcctcaagcaattctcccacctcagccttctaaagtgttgggattacaagcatgagccaaccttgcctggtttttcatatctgtgtttttttcctttttccatttgttttgtatcctgtaccctgtctttcctgtccttgtatttaatcatgttttctttcttttctgtcttttttttttgtttttgagatggtctggctctgtcacccatgctggagtgcaatggtgctgtcttggctcactgcagccaccactgggaccacaggtgcacaccaccatgcctggccaattttttgtagagacgaggttttgccacgttgcccaggctgtacttgaaccygtgggctcaagtcatccacccacttcggcctcccagagtgttgcgattacaggcctgagccactgcacctggcctgtttagttttttattgtttctggaatggtatttattacttgtttgtcttccagttctatcctgaattcaatgatgaaaatctccttactatataatactctacagtgttgcttctttgagtttttaagtgagaaagagtgtgttatttttcattgtctttgagactattaaaaactatttctctcaactattcacatttccttggcaaattcctcttgtgattaatgtattcctctttataatatatcagcataatttccatgctgattctttgattgtggccagctatttattgaagaatgacacmaaggatgggtgggagaatgagacgtgtattctataactttacacgttttgttttgttttgtttttgagacagagtctcactctgttgcccagacggagtgcagtggcacaatcttggcccactgcaacctccgcctcccaggttcaagcaattctcgtgcctcagcctcctgtgtagctggggctacaggtacataacaccrcacctggttaatttttttgtatttttagtagagacggggtttcgccgtgttggccaggctggtctcgaactcctgtcctcaagtgatccacccacctcagcctcccaaagtgttgggattacaggcgtgagccaccgtgcccagcctataactttacatcttatttgcccatcttctgtgaaatctgtagtttcctttactcttgggatgcattctcctagtttttgtcatttagagttactatggtttaaaacaaagccttaaaattgtaggtatttaacattgtgatctggtgatcattgctttccctgcctcctcctccctatctgtggcatggtaagtagatggaagatagtaggcatgatacttaagcatagtttttcctattctttaattaacatctgaatctctggagagaagttccccaatttttctgggacctgcccatagttattctgaccacaggataatttgctaggctttttattctgaataattacttttagaaaacgtgtyttagctgatactcaggcatatttcacagtagcattggcaagatgctttggattaaactaaatctggttgtatatgtgtgtctgtatgttggrctaacaaattgaagacattcatgttacacctaagacttgggacaacctatattatagaggcaaatatggtttggtgttcagcttacttgtaatattttaaaatcaaagttgtttttttttttaaataggtcctaaaggaagctaaaaaaccaatggtggttttaggcagttctgcactccaaagaaatgatggagcagcaattcttgcagctgtttctagcattgcacaaaagattcggatgactagtggtgttactggtgattggaaagttatgaatatccttcataggtttgttgagtaattgctttatatactataaattcaagtaatgttgtgtatatgtatgtgttcctgatacactgttaaatttaatttacaaacaacatttagcaacattatcccagttacacatgtgaaatatagacctttactctgtgtgagaagagcccgagatgataaggaatatttaaaatatttgaaataacagtgagtgttgagaaaaaaagtgaagtactataaaaattgttatattagttayaccttggttcaaaaattgcaacaagttctttaattaaatgataaaaatgtaagctaatatgagaattcagctaaaggatttctttctttctttttttttctttttaattatttggctttttgttttgagacagggtctcagtacagtggcatgatcatagtccactgcagccctgacttcctgagctccagcgatcctcccacccctgcctcccaagtattaaatggctgaagctacaggcgcatgccacatgcccagctaattttttgtttttgtagagataaagtctcactatgttgcccaggttgatctcaaactcctgggctcaggcgatacttctgcctcagcctcccaaactgctgggattataagcgtgagccactgcacctagcctttatttcaaaccatatcaataatgcaggtttaatttaggtaagttgaaaagagacagatatgtgcagaaatggaactgatccttattctacaatgtgtagataattattactattttcatgcattttcttctagtttttttctttaccctgcgtaatattttattttatttttttgagaccagagtctcactctgttgcccaatctgaagtacagtggcaygatcttggcttactgcagcctccccctcccaggttcaagcgatcctcctgcctcagcctcccaagtaagctgggactattggcatgtgccaccacacctggctaatttttttattttattattattattattattatttttgagatgaagtattgctctgtcacccaggctggagcacagtggcacgatctcggctcactgcaacctccatccctgaagttcaagcaattctcctgcctcagcctcctgagtagctgggactacaggcgcgtgccactatgccaggctaattttttgtatttttagtagagactgggtttcaccgtgttagccaggatggtctcgatctcctgacctcaggcgatctgcccacctcagccttccaaagtgctgggattacaggtgtgagccaccacgcccggcctaatttttttgtttttagtagagatgggatttcaccatgttcgccaggctggtctcaaactcctgacctcaggtgatctgccaccctcggcctcccaaagtgctgggattacagatacgagccacttcacctcacagctgtgtaatattttttagttacataggtgaaattatactgtgaatacaattttgtgtcctggtttcaataggttttcattgccaaatgagaatttcctactatggtcagaaatttttttctagaaattgtttgtaaataaaaatgttaatggctaattgatatcatgaatatactataaatttttttagccattttcttctttttaacatgtatgttgatggtagtttttaacttcttaaataatacagtgattcacagatacctttgcacttgaaattatcttcttaggatatatttctaaaagtagaactattggggcacacaggataaccatttctgagcctttcgaagcatgcttccaacttgttttaggtcctcagaatggctactatttctagatagttaacaaataccaagctaaaccaaaacaacaaccctgctattcaaagtatatttattccagacctcttctttaaaagattattttgtgcttataagagtaatatatattcgtagaaaaaatttctataaggttttggttttctcattatggtttttgctgaattacagtttaatgagtggttttcaatttctcccttttcatttttgaaataatctgatttttcttctttgaatatatatgacttatcatgttttatgtcttactttattgaataagaatcagacttaaagcaattacagttggcataaaatttctagaattatttcattcaatactatgtcatggagagacagagcgtcctaagaatctgacatttctttggttgccattctcaaaacagtaaaagactgctgtttctggttttagcatctattttaaatgggtaagaatgggattttttggccaggtgtggtggctcacacccgtaatcccagcactttgggaggccaagrcaggtggatcacctgaggtcaagagttcaagaccagcctggccaacatggtgaaaccccatctctactgaaaatacaaaaattagcygggtgtggtggcatgtgcctgtagtcccagctacttgggaggctgaagaaggagaatcgcttgaatccaggaggcagaggttacagtgagccgagatcackccactgcgctccagcctgggygacaaagtgagactctatcgccgagaaaaaaataaaataaaataaaawgggttttttgacattgttgaaaggaaattattccaaaaatcacatttaattttttacatygaaaatactgcagttatggtaaaattccataattgctttgcaggattgcaagtcaagtagctgctttggaccttggctataagcctggggtggaagcaattcggaagaaccctcccaaggtgctgtttctcctgggagcagatggaggttgtatcacacgacaggatttgccaaaggattgtttcattatttatcaaggtaagtatcacctgtgacaccagaaacaaaagagagtagtacattatgtatgttagaaaccatttagtaatatatttagtgaactgaatgttttccatttgagaattttgcctcccccactcctcctcctttttttttaaacaaaccacaagtgttattagttacataattgatactgcttttaagaattattacctgccgggtgcggtggctcacacctgtaatcccagcactttgggaggccagtgcgggtggatcacctgaggtcaggagttcaagaccagcctgaccaacatggtaaaaccctgtctgtactaaaaacataaaaattagccgagcgtggtggcgggcgcctgtaatcccagctactcgggaggctaagacaggagaatcacttgaacctgggaggcagaggttgcagtgagccaagatcatgccattgtactccagcctaggcaataagagtgacattccctctcaaaaaaaaaaaaaaagttaaaccaaaatatatgaactaaatcctgttccttgggtgccgtggctcatgctgtaatcccaccactttgagaggctgaggcaggaggatttgttgagcctaggagttctagaccagtctgggcaacatagggagaccctgtttctacaaaaaatttaaaaattagctaggcgtgttgctgcatgtctgtgatcccagctacttaggaggctgaggtgggaggatcacttgagttcaggagtttgaggctgcaatgagccatgatcacgtcactgcactccagcctgggtgacagagcaataaaaaatgttatttttaataaaattaaaaacaaaataaactaaaatcctgtttttagtcctttaagaaataatcattgttgagttttgatatgcgtacttcataacatcttcatacgcatatacaaatgtgcacaaattatattaaactatatattattctacgaytttcttacacttgattcagatgtttctaaaggtcttcttttctgaataacttttttcttctgccagttgttattaatgggtggcagtgtttccaaatttttctgtagtttttcgtttatgcctttttcagtattactgtcatattcctgtctttgcatcctcccccatttcagtctactttaccaaatttcacaaactggtacatctgagcagttctactttgtaagcatcagtatacttacttggctattttatatgtgtgtattatattatacatatttgtatttgcataaaatagtctgagaagatacttttttttctttaaaaaaaaaatttttttttttgagatagagtctcactctgtcacccaggctggagtgcagtggtgtgatctcggctcactgcagccccagcctcacgggttcaaacgattctcatgcctcagccctcttgagtagctgggattacaggcacacaccaccacattgggctaatttttttgtatttttagtagagatgcagttttgccatgttggccaggctggacacaaactcctggcctcaagtcatctgtccaccttggcctcccaaagtgctgggatcacaggcatgagccaccacacctggcccccaaatgctttaacaataattttctttggggccgggcgcggtggctcatgcctgtaatcccagcactttgggaggctgaggcgggcggatcacaaggtcaggagatcaagaccatcctggctaaacatggtgaaaccctgtctctactaaaaatacaaaaaattagctgagtgtggtggcaggcacctgtagtcccagctacttgggaggctgagacagaagaatggcatgracccaggaggcagagcttgctgtgagccaagattgcaccactgcactccagcctgggcgacagagcgagactccatctcaaaaaaataataataattttctttgggaagggagttgaattagggttgaggtgggctttaatttttattacttcactactgtttcattttagttttaaaaacttttgtgactttacaaaatgggatttaaaatgatatatactatcttcatgtacagtagaaaatcagtttttaataaaattttggtttaccattttccatctttgtgcaggacatcatggtgatgttggggctcccatagctgatgttattctcccaggagctgcttacacagagaagtctgctacatatgtcaacactgagggtagagctcagcagactaaggtagcagtgacacctcctggcttggcaagagaagactggaaaattataagagcactctctgaggtataatttctgagtcatttcttagtgatgctactaaaggcatatttgatattttagcctgttagaatgattttcaaagtcaaggaagatgccagtctgaaatgcagagatgatttgaataatttctatagaaaacatgtattcagaaayaggaattcaaggttacagtgagctctcattgcaccgctgcactccagcctgagggacagagcaagaccctgtctcttaaaaaataaaggaacttgaaattggtgcttttattttattttatttatttttgagacagagtttttctctgttgcccaggctggagtgcagtggcgtgatctcagcttactgcaacctccacctcccgggcgcaagcttcctgagtaactgggattacacgcatgtaccaccaagcctggctaatttttatatttttagtagagatggggtttcgccatgttggccaggctggtcttgaactcctgggcctcaagcagtcctcccacctcggtctcccgaagtgctgggattacaggtgtgagccactgcacctggcctgaaattggtgcttttattgttgaaaattgttgacttgtcttttgcctgaaaatacatctgttagctctttattgatgtaaaagtaagcatcctgacttttaaaataataacacattgtaaactttatgtattttaataacaggttagcaaaaacatttggatttagcatagtattgtctcttcatttcatagagtcactaatgtactgacagctgtgaatgaattagaatttttgatatttgtgttccctgcttaactgcttccttcataaatgtatgtctactaatggacaccaataggtttttcagtagtgctgcattatttcaccatagttacaattatctattattkgatatttttaagtattaaagctttttgttgtttttggggacctgacatgttgtagattgctggaatgactcttccatatgatactctggatcaagtaaggaacagattggaagaaktctctcctaatcttgttcgatatgatgatattgaaggggctaattacttccagcaagcaaatgagctctcaaaggtaacagctcgcctatgagcagttttcataatgttgtatctactggtgtaacagtactagttttccatattattgttgatctcttcttttttgtgcagctagtgaaccagcagcttcttgctgacccacttgttccacctcagctaactataaaagacttctacatgacaggtatgtaattgtcaacatgactctgccaaatacgaaaggtaagaagtaatcagatcacctcatttggtgttataattccaatttgtgattgatagtgtttgcaattcttaatctttgaaggttttcaaacattggaactaacgtaagcatattttctgattctactctagtttttttgtttctgaaatgtaagcaaagtttgaaaatccaagcaattaatagattttaaatataaaattttgctgttgtaaggaaagtcactgtgtagcaatttatggygaattttccaaagtggcaaataactgcaggtttttctgagaattataggtggaagaatcaaaacatttaaatgtgaaacatgttaaacagtgcttctgatgtaaattgttaggaatgtttttaaggaatgcagacaaactgaaacttgtttattgcagattcttagaacagttgatacaacatctaggttatgaggtagttaatagttgatagattattttgactaattttctatctaaaagcacatagaactcttaatttttttatatagtttgtatctaagattttttaaataagtattttagttagataataaagattaccttcattgtaaaataatacctatgctcaaaagcacaacaaaaaatcacttctatggtatttatctgcgaacttatgaacacaaagaaggaaacaacagacactgtagtctacttgagagtggagagtgggaggagggagaggtgcagaaaagataagtcttgggtactgggcttaattcctcggtgatgaagtattctgtacaacaaatccctgtgacatgagtttactggtgtaaaaagccttcacatgtacccctgaacctaaaagtttttttttttttwaaaaaagaaaaatcactaccctcccactatcaagaaataactataattatttttaacattttagtcactcttcctccagggacatacatatgcattatacacatatatattatattaattaactattgttatttatatgtaattattactgtttacatgtacgtgtgtgtgtgtgtgtgtgtgtataatttttgagatgagattttactctgtcacccaggctgaagtgcagtggcacaatcttggcttgctgcaacctctgcctcctgagctgaagtgatcctcccacctcagcctcctcrgtagctaggactataggcgcataccaccacatccagctaatttttgtattttttgtagagatggggtttcgccatgttacccaggcagatctcaaactcctggactcaagcagtccacccacctcagcctcccaaagtgctgggactacagatgtgagccaccacccctggcctatatattttttagtgaaacagaargtgagattaggcctggtgcagtggctcatgcctgtaattccagcattttgggaggctgaggggggcagatggcttgaatccaggagtttcagaccagcctgggcaacatagtcagatctggtctctttaaaaaaaaaaaagtgagattattcacttgggggttgatagctttattgaaatataattcatgtaccctaaaatttactcatgaagtggacaattcaatgtattttagtacatatgctgttttgtaacctttttcaataatagtattgtacacatttttcctatatttatttatttatttatttttttgagacaagagtcttgctctgtcgcccaggctagattgcagtggtgtgatctcggctcactgcaagctccgcctcctaggttcacacgattctcctgcctcagactcccgagtagctgggactacaggcatatgccacaacacctggctaattttttgtatttttagtagagatggggtttcactgtgttagccaggatggtctcaatctcctgacctcgtgatccacctgcctcggcctcccaaagtgctgggattacaggtgtgagccaccgcgcctggcctttcctatgtttttaatacttttctataattttttaatggctgcatactggtgcactgtctagctgctctatagttatttgattgtttccagggatagttattgaaagcatktggccagtaaggggtttatcgttggaatctgttggttacatataattatatatacttgcatagggccttataatcttttttcctcctgaatatgtgcaccattaaagttttagtatgtgctttttaaaaagttgtattatcaaaatgacattttcttaatatctttcagattcaattagcagagcctcacagacaatggccaaatgtgtcaaagctgtcacagagggtgcccaggcagtagaggaaccatccatatgctgaagcttctactaggatcccagttttgccgcagataattaatggacaactgtagkgcagtgatcctttacaggtttatttctttgtaaaaaaaaataataataatttgaatcatgtaatatttaaggttatactatgcctatttgaaaatgatattagtyatcaactttgcagtttgaaaaacatgtattgtgtgtaaaggttaaataacaaaactatgcagatgctcttaaaagcattgataacctttgtgacgaacataaagagatccttaaattatgagttgttggcttatcttcataaataatttgtctgtaaaatggatgaaatgaaaagagkttcaattaaaacctacttttttctagtgctaaagaaaagatttaagcaccttgtcaagctgggtaaataggaaaaatacataatcatgctcagatatgtatctaggataattataattaawaataatcatagtaacaatggctaatgataatttagctttattatatgtgctaagcactctggttttacatgcattatcttcttttgttcttgctacaaccctgtgagatagtagtattatctcattttactgatgaagactgaagcctaggtatattaaatagcttgcccaaggccacacagcaaaagtcaccaactcaaacctacttcttatttactccaaagcctgttgttcttaactgcaacatattatttcgtctcattaatgttgattctataggttgttacttctaaaaattagtattgagtttaatggtgaacacatttttctattttctcttgaatctgcttctataatgtcatggtgatttatgtggcttttttttttttataagttatacatgtatgcatgtatacttatgagacctcccttggaatgagggaggtctcaagagatataatttagattctcattgatgttctgtattcattatcctaacaccatctgtagtgttaaatcaactaaattatttcagcaataggagacaaaacaaccagctttcataatttttaattgtcaaaaccaaaaggaatcagaataaggatcactgagaatttaaaaaaataaaaaaggaagtaaaaattttacaattaggagataattaaaaatagataatttttttttttaatctaaggttgggtgtggtggcttacacctgtaatcccaacacttggggggccaaggtgggtggatcgcttgagcccaggcagttggagaccagtctgggcaacatggtgaaaccccatctctacaaaaaatacaaaaattagctgggtgtggtggtgtacacctatagtcccagctactcggaaggctgaggtgggaggatcacctgacccaggaggttgaggctgcagtgagccgtgattgcgccactgcattccagcctgggcaacagagcaagactttgtttcaaacaaacaaacaaaactatgttcacaatttatttgttttgtaatccttattcttttctgctttcactaaagactcagcccaagtataggatgccctttttccctttgtttttttttttttttttgagatggagtcttactctgtcacccaaggctggaatgcagtggcatgatcttggctcactgcaatcaccacctccctgattcaagcgattctcctgcctcagcctccccggtagctgggattacaagcgcacgccaccacacctggctaatttttgtatttttagtagagacagggtttcaccaatttggccaggctggtcttgaactcctaacctcaggtgatctacctgccttggcctcccaaagtgctgggattacaggcgtgagccaccgcgcccagtctaggatgtcgtttttctgatacaacaaaggataaggttttagaataatagtatgttacaatatctttaaaaacagcaggtgcagtggctcacacctgtaagcccagcattttgggggttcaaggcaggaagatcagttgaggccaggagttcaagaccagcctggactgcatagcaagatcctatttgtacaaaaaaatgtaaaacttaaaattgcacaaaatttgtcacctgtaccagcttttagaactgtttatcttatcctcctcagtgatacatcatgaagttgtgtgctttgcctaaaatgcccagttacctgaaattgtataaattcttgccaaaagtgtttgaacttaatacaaacttcccatctcttacctcttagcactgtgctcatcttgaggggacatagtcccaattttgtattttatataatactgttaatgaatatgtgtagacttcatatggttgtgggtaagagaatactgcattcagatagaaaagatgctatatagctaagttgatccaggatccttgggctacctgctaggcagcttgtggtgaacaatcataatctctaaaaaataccttgtctggaccgggcgcggtggctcacacctgtaatcccagcactttggcaggctgaggcgggcrgatcattgaggtcaggagtttgagaccagcctggccaacgtggtgaaaccctgtctctactaaaaatacaaaaattagccaggcatggtggcacatggctgtaatcccagctactggggaggctgaagcaggaaaatcgcttgaactgagagtcaaggcggaggtcgcggtaagccgagatcacaccattgcactgcagcctgggtgaagaaacaagcctccctctcaaaaaataaataaataaataaataatacctcctctgggataagtagtgctccgtctgtctcatgggcacatattagtgtcgtaatgccaaatactaaggttattgtaagcataaacattgaagataattgctagagaaaaatagactgaaaaagatgtaagaaaaatacacgtagatgagagtaacctgtctggtggaatcatgacattctaagcagtgaaggaatcaccaatgagaaaatctacaaaggctcaagatcaagtctctttaggtgaataaggcaatctagaaagaccttggaataataataccatttcctgaggaccttctaaataagtgccattaaagctttaaatacattaagactattcttcacaaaatctctgctaatagtaggtattaattgagactcaagaaatatcaaataacttatttatggctacacagctagatactaatggcaggagtgtttaattagaagtacttttactatcccaggttgcctcaaatgaaaacattttggacagcaatgtaaggtgaatagctgagcatgatggcacaagctatagccccagctacttgggaggctgaggcacaaggattgcttgagcaaatgagttgagtccagcatggacaactgtattcctgcagcctgcttgtattcctctcctcaaagtgctttttccttctctgccacatgactagtctgtgaattttccaaacttctacgctctgcttcccttttaaatatgttccaactttaagttatttctttgcttccatatctgattgtaggctgctagcatcagccaggccacatcttgaatgctttgctgcttagaaatttcttctgccagataccctgataccctaagtcatcactcttaagttcaaacttccacagattcctagggcctggacacaatgcacccaagctatttgctaaagcatgacatagatgtacctttattcctgttcccaataacttcctcatttccatctgagacctcatcactctggacttcaccatatgtctatcagcattttggtcacaaccacttaactagtctctaagttccaaactttccctcatctttctgtcttctgagccctccagattcttccaacctctgcctgttacccagttccaaagctgtttctacattttccaatatgtatagcagtgccccactgtcagtactaatctgttttaatctgtttgcattactgtaaaggaatatctgagattgggtaattcttgcaaaagagagatttaattggcttacagtttctgcaggctgtacacaaagcatggcaccagcagctgcttctgatgagggcctcaggaagcttacaatcatggtagaaggcaaaatgggagcgagcatatcacatggtgagagagggagcaagagagaggaggaggtcccagactctaaacaaccaaatttcacatgaactaagatctcactcatcaccaaggtgatggtgccaagccattcatgaaggatttgccccatgattctatacctcccacgaggccctacctccagcattgggggttacatttcaacatgagatttggaagtgacagccatccaaaccatatcagcaacataacaagacccccaactcttaaaaaaaaaagttgaatatatatccaaaaatatcttgaattccatatggaaagcctcccccctcaaatttgtagtaaattgtattataatgaatacattaattaaaaatatacttggcctggcacagtagctcaagcctgtaatcccagcactttgggaggccgaggcaggcggatcacctgaggtcaggagttttcgagaccagcctgtccgacatggtgaaactctgtctctactaaaaatacaaaattagccaggcatggtggcatatgcctgtaatcccagctactcactcaggaggctgaggcaggagaatcacttaaacccaggagacggaggttgcagtgagtcaagattgcaccgttgcactccagcctgggtgacagagtgagactctgtctgaaaaaaagtaaaaattaaaaaatatatttgacaatacccagtaccaatttattgtttgttgttgacattaacattttctttaagagtatttcttcatctgtaaaatgaggataaaaattgtaaaattgtacctacttccagcctcatagaattgttttgatgattacatcagaaagcttgtaaaaaccttaggcctgtttcctgacatatactaaatgccccatgtgctaactgaggatgatcattgtaggaaaatttcatagactatgagggaaagccatgcctaaaataatctccagcttattaagaagtgcattcctttttgtttctttgttttatcttagattgagtctcactgtattgccagtctggagtgcagtggcgcaatctcagctcactgcaacctccacctcctgggttcaagcgatcctcctgcctcagcctcctgagtagctgggactacaggagcacaccaccacgcccagctaatttttgtgtttttagtagaggcggggtttcaccatgttgggcaggatggtctcaaactcctgacctcaggtgatccacccgcctcaacctcccagagtgctgggattacaggcgtgagctatccgtgcccagtcaatttttgtatttttagtagagatgaggtttcaccatattggtcaggctggtcttgaacccctgacctcaggtgattcacccgcctcagcctcccaaagtgctgggattccagatgtgagccagcgcacccagcctggccatcttttataaaaagatgaagatgtcagaattccctaataagattctggctctgttacccagactggagtgcaatgcatggcatgatctcagcacactgcaacctccatctcctgggctcaagccatcctcccacttcagtctcccaagtggctgggactacaggcacacgccaccacacctggctaatttttgtattttttgtagagacgaggtttcgccatgttacccaggctggtcttaaactcctgagttcaagtgatccacctgcctcagcctcccaaagtgctgggattacaggcatgagccactgtacccggcccctaataagttttaaataaccaatattttaaaatattttaatagttacatagcactttagtttgctgatttaatttatcccaagggacaaggatgttaatgagaaaactgactagatttcagatcacagattttaagagaacaaggatctcaaaaccaaataccctctgcttaaagtgttttttgtgtttttcactactgaaaatgtttagagattgacttacctattgctgatactcaaaacatctgatatcttaatatttttaaataactcactaaaagcatatgttgaaaatggcaatgtatagtctgagactggtgattagactggactaaaagcatatgttggaaatggcaaatatatgatctgagactggtgattaatttacagtattggcacctaaagagatactgagatgaataacttattaatttccttcttaaaatcataattttggatctgtaaaggactatacaaaaaaaaattttagtattatacctgcattttataattgtggaaatggaggccagaaagaataagaggcaagttaggggcagatcttgggtttggatcagctcttctgatgcctggttctgtgacattacaaagcctgaaattcagctccaacatcta

SEQ ID NO: 93664 - DNA, 25715 bp, Homo sapiens
  misc_feature (1)...(25715): n = A,T,C or G
ttgcatacttggaggtcagagggagtgagaaatttggctggggtggaatcctgactccactcctcccagccgggttgccaagtggtttgggcagcagggccccctctgggcctcagtttccccgtgtctcgagtgggagcggctccttgcacctgtgaggtgtttaccgctgccagcgcaggtgctgcccagttatatcagttgacatcggctgttgggtggagcctcagttctgcgcccgttaccctccaacacccagggtgtgcgcattacccaagccygcagagttttgtttaatttttggtgattgcagcacggtagccaaactcatcctactcattagcatatcctgggcatctcagggagccacaagaggaaagtgtgccacaagttccacgaccaccctgggccatcctgggcacagcagacactatttttttttttttttgagacagactctcgctctgtcacccaggctggagtgtagtggtgcaatctcagctcactacaacctccaccttccgggttcaggtgattctcctgcctcagcctcctgagtagctgggactacaggtgcccgccaccacacccagctactttttatatttttagtagagacagggtttcaccatgttggccaggctggtctcgaactcctgacctcaggtgatccgcccacctcggcctcccaaactgctgggattacaggcacaagccactgcacctggctggcagacactttctgagtgcaccaggctctgcggcggtgtcrtgggggcgcygggctctgggtgggggcaccaggctcggtggcaatgtcacgggatccttggggtgttgcttcgccagctggaaacctctgtggccagtcgcacctttgcccaagtttttactcaggcccactgggctcattcagtgcacttggcctgacaggctgtgctcagctcatgctactggtatgaatctcacacctgccaggcatggagtggcgaggggtgtgtgagggagaaatcgtgaggtctggccactgtgcacagccaggcacaccggctatggtagagcgggccatttcgggtgccactgggggcgctggctccctgcgaggctgcagctggaccaggtgcaccatgagcaggttccatggctggcacgggggaatgcaggggcacccagaaacttggagacgccgggagccgcagagcctcagagacggtgtcgcaggcctggctggggaggtcttaggtctgggcttcccgaagggacacagctcttctctccctctctcttctctccttcttgtcactcacaacattgttagcaagggacgtgtttcagccctgtttgtgtgacagctcttttagccctgccgtttggcaggtcacgagttcttgtcttgcatccaggaagaatgaggtatgggcacaagtagagggtgagcaaggccagcaggaaatttactgagcaacagaacagctcagaggagactcgcagtgggtagctcctctccgcaggcagggcatcccagctagcgttcagctctcagcagagaggagaccctggaatgggtagttcctctctgcagctggcagtcccaatgtctgctcagctctcagcagagaggggagcctggagcaggtagctcctctctgcagctggtagttccagcatctgctcagctctcagcggaggggggaccctggagtgggtagctcctctctgcaggcaggtcatcctgtcatctcctcaaatctggctgagtctggggttttcataggcttcagaggggaggaagtgcatgctgactggttcatgggcggccatgggtgggcctggacaaagcactataagttcccattctggtccctcagcccagctcccaggcttcaggccatccctggcttcagggtgggccttcactgtggacctgcccctttccacccaagagcctctctgcctcctgccgtcatctatggcgtctaggctgattgtgccaaggagctgccctcagccccttctcagccatggttgggaagctgcacctgcacccaggaggatggggttcctgcccactcccacccccaagagcaaaggaatgcgcagatctggaaccatggctgggcagctgccactgaacctggggagcacaaggctctctccctgctggcttggaaggtgggtggcttctgcctgttcctggctcccaccagctccgtggagcacgcagccccggcgccacctccccactgctgctggtgtcatgacagtgactgctccagacaggccgccgccatctgtgcgtgtcacatatctatgcagagactgctgcagacaggccgccgccatctgtgggcgtcgcatgcccatgcagagactgctccagacaggccgccgccatctgtgggcrtcgcatgcccacgcagtgactgctccagacgggccgccgccatctgtgggcgtcgcgtgcccacgcagagactgctccggactggccgccgccatctgtgggcgtcgcatgtctatacagagactgctccagactggccgccgccatctgtgggtgtcgcatgtctatgtagtgactgctccagacaggctgctgccgccatctgtgggtgccacatgcagagtgacccaggggcttgccacaagggggacagtcaggcagggactctgtgtgcacatgcatccaagcacaaggcaggtgtgggcagagaagcgagttggagccatcctcaggaggagtgaattactggggatgttgaccttgggacaccaggaagagaatctcatttgcagaggaggaaaacgctgctggaacggaaagtctgagaaagacagcaagagcaggccagagcaaagcaggacgcgggagtgaaggcctgcagtgtgggtgcgtgtgcaagacccagaaacgcgcagatgtgtggggccagcaacaccacggccacatcctcagccacagaacaacacacaacatctcaaggatgaactcatcaacgcaccaacggttagtctcttatctaataaataaagcatatcccggttacaaataatcaacacagatgtttcaatgatcttgagtagaaagttgagagcttgtcatttgagtcaggaaatgggactccgcggaaatgatggccttgagagagccctcatgtgttctttgtgcagtcggcaattccatgtagacaggaaaaatggactgaaaacttaaactgatatgatgaagataatatcattcaattgaaaatgaaaatggaaaaagtcatttataaaccatttgaatggacaaaaaagaaaattggttaggaattaaattagctagatgaaagtcactttttttcttttttgcttttttttttgagatggagtctcacactctattacccaggctggagtgcagtggtgcgatctcggctcactgcaacctccgcctcccgggttcaagcgattctcccgcctcagcctcctgagtagctgggattacaggcgtgagccacagtgcctggccaaaagtcactcttttttttttttttttttttttttgagacggagtctcgctctgttgccaggctggagtgcaatggagagcagtggtgcgatctcggctcactgcaagctccgcctcccgggttcacgccattctcctgcctcagcctcccgagtagctgggactacaggcgcctgccaccacgtgtggctaatttttttgtgtgtgtgtgtttttagtagaaacaggatttcaccgaataagccaagacggtctcgatctcctgaccttgtgacccacctgcctcggcctcccaaagtgctgggatttcaggcgtgagccaccgcacccggcccaaaagtcactcctaaaaatgctttctcggccgggcaggannnnnnnnnnnnnnnnnnnnnnnnnnnnnnnnnnnnnnnnnnnnnnnnnnnnnnnnnnnnnnnnnnnnnnnnnnnnnnnnnnnnnnnnnnnnnnnnnnnnnnnnnnnnnnnnnnnnnnnnnnnnnnnnnnnnnnnnnnnnnnnnnnnnnnnnnnnnnnnnnnnnnnnnnnnnnnnnnnnnnnnnnnnnnnnnnnnnnnnnnnnnnnnnnnnnnnnnnnnnnnnnnnnnnnnnnnnnnnnnnnnnnnnnnnnnnnnnnnnnnnnnnnnnnnnnnnnnnnnnnnnnnnnnnnnnnnnnnnnnnnnnnnnnnnnnnnnnnnnnnnnnnnnnnnnnnnnnnnnnnnnnnnnnnnnnnnnnnnnnnnnnnnnnnnnnnnnnnnnnnnnnnnnnnnnnnnnnnnnnnnnnnnnnnnagcactcccgcctgggcgacagagcaagactccatctcaaaaaaaaaaaaaaaaaaagtttctcaacaaaaacttaacggtggcatagttctgatgaaaatcttcatgttcatggcatggagttaaaatgtccaaacggtcaaggccacagattaaaacagggacatccgcaggccctggcccgaggggaggagcatacagggagtggttcacccactccaccgcctttggagcaccttttaattctctcactcttctctaatgtgttccttgatttatctattaccatctgcggattttcatctgttcttttttgccttttttttttttgagacggagttttgctcttgtcacccaggctggagtgcaatggcgggatctcagctcactgcaacctccgcctcccgggttcaagcgattctcctgcctcagcctcccgagtatctgggattacaagcgcccgccaccacgccccgctaatcttttttgctttttaaaattgtgaaatgcggtatacacacagaaaagtgcgtgaacacacacatacgtaccatttaatagacagttataaagtgatccgcccgcctcagcctcccaaagtgctgggattacaggcgtgagccaccgcttccggcctcaggagaggattcgtgtttgcttctcccaacgtccagggaagcgacatttcctatttgctttagactaaaatctatacttgaattttttgtttactgtaggtaatattaactagggttgcagtccgtggagggccgactatgcgaacggtttctatgaaccatcctttgctgaaggctgaaacctcttcgtcccctgggagagttcctattcaggccttcttgtagttagttcatccttgtgttgacagctatattagggttctccagagagacggatccagtaggatatagacgtagatccaggacaggagatggactgggggagctggcgtttgcaattacggaggccgagaagtctgtgagcgggagaccccgggactcgggtagccgggctcagcccaggtcggaaggcctcagaagcggggaagcggatggtgtggccctcagcacgacccaccccaaatcatgccttgccaggtttctgggaattcctggtccagcccagctggcacctgacactggccgtaacggcagggccactgttagctgttagcttcagggccccaggtttaggggcggtgtctccgttgcacgtgcaccccgagcgcgcccgccactccccacatcaggagctctgttcctcgggttcagcaaacgcccgggcgaaagcaatcttaacattctgggctcccggcacccagaccttgggctgatgtcccttgctagtgggtcagctctttagaaaatatattctaactatttccatcagcatttccacttattttgtgcaggagagttgaacccaaaccgtctgggtcggggtcggtcagggccccgccccctgacgtcatctcacccccacccaatcccccgcgcctacctgcctcccggcccctccccttcccgcccctcaatcccagcgctcatctctgcggccacgcccgccccttcccgccacccaatcctagcgcttgtctctgcggccgggccccgcccccacccgccccccgcccaatcctcgcgcggwctcatgtttgcccgctcggccgccgtctctcgagtctccgccagatccggggcgggtccgcggccgcggcgggaacatggaggagctsctgaggcgcgagctgggctgcagctctgtcagggccacgggccactcggggggcgggtgcatcagccagggccggagctacgacacggatcaaggacgagtgttcgtgaaagtgaaccccaaggcggaggtcaggcagcgggtcgggcgggccgggggaccggtttctttccggagagggtcgcgggcctcggcgcggggcgcggcctgggcttctcccgccggaggccgtgggtggctctcccgggactgccgccgccgccccttgcggggaaccctttgcgcggggcgagcggtgaacgggggcggcggaagcgtccggggcgtccggaggagtttgcacctgcggggaactgtccggagcaggaaccgcggccgccccacacctcctgttctccgtgaactttctctcgggggcgctacgtgaaatggggcgggwctggctgctgcagtcttgctcccsgggttcctgccctgcggtgctggttaagtggggtcgttctagccggggaagctgcttaagtcctcagcttaagtgactctggaggtgtccatcccccgtgagcctcggtcagtacgttgtgaaacggggcgaaggtgctgcccccaggccagctgctgcgcctcaccacaccctggcatgctctgtccttctgttagactcattctcgggccgggcgcggtggctcacgcctgtaatcccagcactttgggagacagaggtgggtggagcgcgaagtcaggagttcgagaccagcctggccaacaaggtgaaaccccccatctctattaaaaatacaaaaattagctgggcgtggtggcgggcgcctgtaatcccagctactcgggaggctgaggcagaagaatcgcttgaacccaggaggcagaggttgcagtgagtcgagatcgcgccactgcactccagcctgctgggtgactgaatgagactccgtctcaaaaaaaaaagagtgttcctagcagcggtgacatggcagctgtggtggggctctgaggctgaggaggtggggactctgaagaactgaaagaaggatgaagacagctggaagtcaggagcacgaggagagtgtgtgtgtctrtgtgtatgttgtgtgtgtgtacgttgtatgtgtgtatgtttgtaatgtttgtatgttgtgtgtatgtattgtgtgtctgtgtgtgtgtaagggtggagccccaggtgaggatgggagagtgggcagggcagtggtgtgtgtctcaggagaaaaagaaaggccgctggccctgacctgttctgcggggatcactgctgtgtatgttgtgtgtgtgtgtctgtgtgttgtgtgtgtatggtgtgtctgtaagtcgtatgttgtgtgtgttgtgtgtctgtatgtgttgtgtgtgtgttgtgtgtctgtatatgttgtgtgtgtgtgttatgtgtctgtgtgtgtaagggtggagccccagatgaggatgggagagcaggcagggcagtggtgtgtgtagcaggaggaaaggaaaggccgctggctctgacytctactctagggatcactgctgtgtggtgagcagggggacccaagggaggagttgctgtggtcccggggagttggatggaaacggcatctcaagatgaggtggtttccagtgctgggcaggaggtggcatggaacttggtggtctcttcaggtgaaaagtgaccccaggtcactggcataggcagccagggtgccgcctgcacctgagaggtcgggtgagtctgtgtcctgtaggtggaacaggactgcagttgaggtgtcgtctgaggacactgacaggtaacccatgttcacagtcccactgttgccggatcttagtggaatattagtgccttcgattttcctctctccagagaacctcccaattcaaccacagcacacaagtgtagtccaacactggaaagctcaagccctcttcttccagtacagcctctgaacctgtagcctaccctgttggcaagtgtgtttgaaaacactgtccatgtgtatggaatcctcagtcaggatagtcttggtttgaagttgtaatgctagaggaaaacatatctacagaaccttccggaagtaaccttgcctccctgtatttccacttcctctcgtatttttctgacaggccagaagaatgtttgaaggtgagatggyaagtttaactgccatcctgaaaacaaacacggtgaaagtgcccawgcccatcaaggttctggatgccccaggcggcgggagcgtgctggtgatggagcacatggacatgaggcatctgagcaggtgcatcttcacaccaccccccaccccccacctggctttattacstgagcaggtgtgtcttcacaccttgttttattaygtgtgtcttcacaccacccactggctggctttattatctgagcaggtgtgtgttcacaccaccccccagctggcttcatgccccgccccggctggctttgttatctgagcatctgagcaggtgcaccctcacaccagcccccagctggctttcttttccaccaagtggttctctgatgactgaagcttgtactggggacatcattttgaggagtgtaatgcaaagaacccgtgactccacataccatgagttctgcagaatgaacggcaggcactctctgcaaccaagggcagaagcaagaggaatctcccaaagtgagatgctgaccaaaggcctcgctgcacgccggccgcggtggctcacgcctggaatcccaacacttcgggaggctgaggcgggtgmatcacttgaggtcaggagtttgagaccagcctggccaatatggtgaaaccccatgtctaccaaaaatccaaaaattagctggatgtggtggcaggcgcctctaattccagctactcgggaggctgaggcaggagaatcacttgaacgcaggaggcagaggttgcagtgagctgagatcgcaccactgcactctagcctgggcagtagagcgagactcagtctcaaaaaagaggaaaaaaaaaccactgcaaacttggatgaggctgggaaagatcgtcaaataatcaacacctttatccccctcttgcttcaccagaacctactttctgtcctcaaaatgtccgacctactagccggctgtggtggctcacgcctctaatcccggcactttgggaggccaaggtgggcggatgacttgaggtcagagtttgagaccagtctggccaacacagtgaaaccccgcctctactaaaaatacaaaaaaattagccaggcatggtggcgggcaccagtaatcccagctactcgggaggctgaggcaggagaatcgcttgaacctgggaggcggagcttgcagtgagccgagatcgtgccactgccctccagcctgggtgacagagcgagactccatctcaaaaaaataaaaaagtttgaccctctttatgtgccctgagactgagcagtgggtgtgttgccattctgtgtgtcatctgtttagttgctgtcgtttgatttgacagtcatgctgcaaagcttggagcccagctggccgatttacaccttgataacaagaagcttggagagatgcgcctgaaggaggcgggcacagtgggtatggcactgcgcgggccacgggtgctcccgcctagaggaggacgttcagccggtgtgggctcagagcgggggccgtgcagcagccgtgggagggtcggacrtgggctgatggcakagcaagggaatgtyggccttgagccgcatctcacggtgcactgaacacagtgactgtgatgcgtctgttgtgtcctaaatgcatttgaaagatgaaaacatttgctggacacaagacacccctagtgttacagttacttttacctctcgttccccasaagagtgkaagcagaggctctctggctgtctgtaaaaggcaagacctttaacccagggtctgttcctgtaaaacagtcatacttgaggctcagaattacagccatcatgtctgacctttccagagcataacgcgctgtcaggatcgagggaattttccggtattttaatctgctgacatttggaatccgtgtgcagcccacatggtaaatgtggggagatttgctgatgatcggaacagatcaccaggggcctgctgtaggagacggagacatgctgttagtctgttctgtgagggtccatgacggatccacccaggcggcctgtgtggtgaggatccactgagaggcctcccaggtcgcctgtcctgtctcttccagtcttaacggagtttagtccattgggattttccttgaattagggagactgcagaggagtgagattctttctttctttctttcttttttttgagacggagtttcactcttgtcccccaggctggagggcagtggtgcaatcttggctcaccgcgacctctgcctcctgggttcaagcgattttcctgcctcagcctcctgagtagctgggattacaggtgcatgccactgtgcccacctaatttttgtatttttagtagagacggggtttcaccatgtaggccaggctggtctcaatctcctgacctcaggtgatccacccacctcagcctcccaaagtgctgggattacaggcgtgagccactgcaccctgcctgagattatttcaaagcacaatagtttatctgacacacatggcaccaggtttgccactgagagccatcctttctgatggattgggggcagattctttttcctctttatttatttatttttattttatttttttgagaaggagtcttgctttgttccccaggctggagtgcagtggcatgatctctgctcactgcaagctccgcctcccgggtccacgccattctcctgcctcagcctcctaagtagctgggactacaggcgcctgccaccacgcctggctaattttttgtatttttagtagagacagggtttcaccgtgttagccgggatggtctcgacttcctgacctcgtgatccacctgcctcggcctcccaaagtgctgggattacaggcatgagctactgggcctggcctgttttttactttttatgttttttatgttttgttttgttttgttttttttgaaatggagttttgctcttgttgcccaggctggagtgcagtggcgcgatctcagctcaccgcaacctccgcctcctgggttcaagtgattctcctgcctcagccttctgagtagctgggattacaggcatgcgccaccatgcccagctaattttgtatttgtagtagagatggggtttctccatgttggtcaggctggtctcaaattcccgacctcaggtgatccacctgccttggcctcccaaagtgctgggattacaggcatgaaccactgtgcccggccatttttatggttttttttgagacggagtttcactctcgttgcccaggctggagtgcaatggagcgatctcggctcactgcaacctccgcctcccgggttcaagtgattctcctgcctcaacctcccgagtagctgggattataggcgcctgccaccatgcctagctaatttttatatgttcagtagagacagggtttcaccacgttgggcaggctggtctcgaactgctgacctccggtgatccgcccacctcagcctcccaaagtgcctttcctctttaagaacatcctcccctttgtttcctgacacagtgtggtcttcccccacacccccgcgtgttgggatgtgagacaggtcccctgagaggtgcccgcaggctgcctgycctgtgtgtgtcctctggtgcccctgctcgggagcagctagtgtctttgatgctkacgtctgctggaggccacaggctcctagtgtttttgatgctgacatctgctggagcaggctctgttaggggtgttgtgtgagctggtggagacccaggccctgtttgtctctggcaggggcataagctggtaggagctcrctgaggtcgtgtctgaaggtgactcagtttcgagagtgggcgctgggatcccttggaactaatttcctttcttttacttttgcttgcaagggagaggaggtgggcaggaggaacggccctttgtggcccggtttggatttgacgtggtgacgtgctgtggatacctcccccaggtgagtgcacggcgtttgcttctatttcacaatcaggtcagctgttcagacacacgggttggggggacacacccccctcctttttttgtgagcttcagtaaaagtatttgcaccattttttctttgctgatgtttgagaggttgacgtaagattgacccacctaatatgctaggtaagcatgaagaaactgaggaggaccagcaagttaggagctggatttcaaggtgggtaaaaatgagggaatttaacaaatgttttattttaggtatactaaactctcaaagagggtggaatgacaagggtttgtcactttyggttgtgtgattttatggtggcttccctccgcatttccacckggggagttctgcttgacgcccagcacatgtgcagtggacagggctcctgtcctgtcctcgrgaggagggtacagatgaacccagaaaacttgccagggtttcctggcgggcgcgggggcagtagaaagactttgaaatgttgaagtttgttcagaaacctgcttaggggcggggagtggtgccctctggtcctgcctgctggcggggggtggggggttttcgccagctccgccccttcgtctcgtggctgtactcacagtgtgtgtgcatgtgtgtgtgtgcatatgtgtatttgtgtgcacgcacgtctgtgcgcatatgtgtatgtgtgtgcatgtgtgtgcatatgtgtgcatgtgtatgtgcaygcatgtgtgcatatgtgtatgtgtgcacacgtgtgtgcatgtgtgtacgcgtgtgygcgcacatgtatgtgtgcaggcgtgtgtgcgcatgactgtgtgcctgatgcatgatgttggcgtcgtgtgctactccagtcgtgtgtgtctgtcttgcttccctcctgggtggtaagcacctgtgacctggatgtcctttctcggggtccttctcaatggggctccatgtgacttttcctgtcatcactgtctggggaggggctgtctggacagatgtcagaagtgagccatggggttggggcaggtcagccagctctggcctcagtactccagtgtgattgtaaattaagaggaaatgttagccagttgctttagcagcaaaaaaaaaatttttttttttaaataaaaaagccctggtggttcatgcctgtaattccagcactttgggaggccgaggtgggaggattgcttgagcccagcagttcgagaccagcctggccaacatggtgaaaccctctctctagtaaaaatacaaaaaattagcagggtgtggtggtgcgtgcctgtagttccagccacttggaaggctgaggtgggaggattgcttaagcctgggaattgaaggctgcagtgagctgtgattgcaccactgcactccagcttgggtaatggagcaagaccttgtttcacaaagatgaaaaagaaagaaaatgttctggaccgggcacggtggctcacgcctgtaatctcagcactttgggaggccgaggcgggcagatcacgtgaggtagagtttgagaccagcctgaccaacatggtgaaatcctgtctctactaaaaatacaaaaattagccgggcatggtggtgcgcacctgtaatcccagctactctgggggctgaggcaggagaatcgcttgaacccgggagacagagattgcagtgagctgaaatcacgccattgcactccagcctgggtgacaagagtgaaacttcatctcaaaaaagaaaaaaaaaaagtaaaaagtaaactaaaaggtagtacagtcagatatcttctgttacatatggaacctgtaaaggccaaaagtgtgctgcatgtgtgccaaccagagcacgagggagcaggccccatggcaccctgtgatgtgagtgtgacttgggacaacgatctttatgggcagcaacgtggcaatgcctatcaaaaaaaaaattttttttttgagatggagtctcgctctgtcacccaggctggagtgcagtggtgcgatcttggctcactgcaagttccgcctcccaggttcacgccattcttctgcctcagcctcctgagtagctgggactacaggtgcctgtcaccatgcccggctaattttttttttgtatttttagtagagatggggttccaccgtgttagccaggacagtctcaatctcctggccttgtgatctgcttgcctcaacctcccaaggtgctgggattacaggcatgagccaccgcgcctggccaaaaatttaaaatttagttttaattttaattttaaaagatagagtctctctctgttgcccaggctggagagcagtggcatgatcatagctcactgcagcctcaaactttctgggctcaagccatcctcctgccccagcctcccatgtagctgggactacaggcatacaccaccacacttggctaattttttaattttttttgtagagacaggggtctcactatgttgcccaggctggtctcaaactcctgggctcaagtgatcctcccacctcagccacgcaaaatgctgggattacagatattgctcaccactcccagccccctttcaaattttttaatttatttaatttatttttttgaaatggagtctcgctgtcacccaggctagagtgcagtggtgcgatcttggctcactgcaacctccagcttccgrgttcaatcagttctcctgcctcagcctcctgtgtgactgggattacaggcgcccaccaccacgtccggctaatttttgtatttttagtacaagcatgagccaccacacctggcccccctttcaaaattttaaatggacttatgctctgacccagtaattatcctttaggatttattctacaggcatatttacaygtatgcaaaatggcacagacacaagggtatttgctgtgccactcttggtactatgacaaggaaaatccagaggagcactgggtgaagtcctggtgcatcatctsatgaactattgtcagctgctacaaaacaacgtaaagaaagygggagcagggccaggtgcagtggcccacgcccgcccgtaatcccagcactttgagaggctgaagcgggcagatcacctgaggtcaggagtttgagaccagcctgaccaacatggcgaaaccccgtctctactaaaaatacaaaaaaattagccgggcgtggtggtgcatgcttgtaatyccagctacttgggaggctgaggcaggagaattgcttgaacccgggaggcagaggttgcagtgagccgagatggcgccactgcactccagcctgggcaatgagagcgaaactctatctcagaaaaaagaaaaagaaaaaaaaatgttctagaagccttcattcttggaaggctacagagtgggtcctgaagcatccccatgcttcccactgctcttgggataggatctgaggtctcagcatgtccatgagactccggttcctcctgggatgtggttcccccctcaggctcctgtgactgccacccctsccacgtgccgctcctgcagccctctccactttgagatgcttgtgggtagctgagctctcccttggttctggcattttccagtgaactgtgcttttgctgttactgtgcaggtgaatgactggcaggaggactgggtcgtgttctatgcccggcagcgcattcagccccagatggacatggtggagaaggagtctggggacagggargccctccagctttggtctgctctgcaggtgagtggggccccactgcatgcccagcacctgccacacaccccacttgcctgaggtaggggaggcaccaaggcaggtgaggccacctctgagtctgattctgggtgggaagcgggtgcctggtggtgtgctatccgctgctgcctgggctgggggcggyggggacctggagcggcgcccctcatgcacgcgttgatcaatttgctgaggctccattttcctccctgcagttaaagatccctgacctgttccgtgacctggagatcatcccagccttactccacggggacctctggggtggaaacgtagcagaggattcctctgggccggtgatttttgacccagcttctttctacggccactcggaatatgagcyggcaatagctggcatgtttgggggctttagcagctccttttactccgcctaccaykgcaaaatccccaaggccccaggattcgagaagcgccttcagttgtatcagctctttcactacttgaaccactggaatcattttggatcggggtacagaggatcctccctgaacatcatgaggaatctggtcaagtgagcgggccttactctggaaggaggcctcagaggtttctccacagtcctcttctgggcaaattcttgtttcttcacatgcyggactagcttaagaccaatgcagtagcttatttccaagccttgcaaagtatataatatctaagaggaaaggttttgtcatcccagcgttgtccactttgtggggctttgtaggtagacggagccacactacaggcagggtatgagcagagggatgtatggagtgtgggtgactctgagcctcactgctgctgcaaggtggggaaactgtaagtgaacccctgtgggtgcgggggagggtatccggtgcgcagggaggtggccagcgcccccgggcactgctgctcataggtacctttccrctgcctcctccctgctctcctgtgcaggaatgtctctgagctgttcacgttgatgcttcttggttggcaagacttgggtgtagayatgaaaccatcttactaaaagygtcttaaaatgaccaattccagaatcaagcgtattccgttttmttcctgcatgatccctgggccctcccgcaggctgagcaagtctgtaaactgattctgggagaaaccaagctgctggccrtaggrtgtccttgggtacatccaggagtcttcattgcttctgttattaccccgtctcctctgccattttctacagcttgctgagttgtcattcctttgcaacattaaaatrcatgctgaactcatatttttccttccttcactgttgtagtaaagagacatatttcatgaatggcattgatgctaataaatcctttgcacaaaaatttgaataaacttccagtggtttcgataaygtacaagattgtatatttccctcatttattgtaattcaatatcttagttgtttgctgaaaaacttgtaatattttgtgacaaacaggtacaactagtgtttttgttgttgtttttagagacggtcttgttctgttgcctaagctgcagtgcggtggcatgatcatagctcactgcagcctcaaactcccaggttctagcagtcctcccatctcagcctcttgagtagctggaactacaggcgtgcaccaccacacccggctaatttttgtatttttagtagagatgaggttttgccatgttgcccaggctggtctcaaactcctgagctcaagcaatcctcccaccttagcctcccgagtgctgggattacaggcctgagccaccatgcctgacccaactgttctttctttctttcttttttttttttaagacagagtctcactgtttccaagctggagtggtgcaatggtgcgatctcggctccctgcaacctctgccctccgccttctgggctcaagcaattctcatgtcgcagcctcctgagtagctggagtagtcggtgtgtcaccacagtggctaatttttgtatttttagtagagacggggtttcaccatgttgcccaggctggtctccaactcctgacttcaggcaatcaacccgcctcagcctcccagctgtttcttttttctttttctttttgagatggagtcttgctctgtcacccaggctggagtatagtggtgcgatctcagctcactgcaacctctgcctcctgggttcaaggattctcctgtctcagcctcccgatgtagctgggattacaggtgtgtgccaccacacctggctaatttttgtatttctagtagagatgggattttgccatcttggccaggctggtcttgaactcctggcctcaaggaatctgcctgccttggcctcccaaagtgctgggattacaggcctgacccaccatccctgacccaactattgtttcttaaaaaaaactctttttaaccttgcctttttgttagggtagaaggatagctcagagcttcaaagagcaggactagcctaagaactgtctgtgatatttgaccagaggtgcagcctagctgccattcttcctcaccctgtggaagacattaaagggagaatgaaagtagctgtagaattacctttgggggaagaagccacttggtgaacttggcaaacacccgtgtttgaggggtcacccagggtgtcatgagctgggccggaggggatggattgattacttgtcttgtttgcttgtttctgttgtaagtcagggcccctcagcagaaggcagaacagaaccgagttcctttagaatgctggtttttgtgtggagtgaggaaggaccgtgagtgtggtcagtttccaacctgacaggacctgctcccgttggccaggactgcagcttgttactttgaccctgggaagaaggtaagtgttcccaagaaaagggacgtcccaaagcggcgccatcccgatggcacstgtgctgctcgactccctgccgggtaggtccatcctgacggcgcatgtgcccctcagctcccccsactgggtaggtccatcccgacagcacctgtgctgctcgactccccccactgggtgggtccatcccgacagcacctgtgccgctcgactccccccactgggtaggtccatccygacagcacctgtgctgctcgactmcccccactgggtaggtccatcccgacagcacctgtgcygctcagactacccgccgggtaggtccatcccgacagcacctgtgcycctcacctccctgccagacggtgcgtgtgccgcttggctccccaccaggtaggtccatcccgacagcacctgtgccgctcacctccccaccgggtaggtccatcccgacarcacctgtgccgctcacctccctgccgggtaggtccatcccgacggcgcgtgtgccgcttggctcaaggccctgacatcgttccactcagcacagcatcaggtgcccgggaccctggacatcatcgttctgtgtcagcacatcaggtgcccggggcccggacatcatcgttccactcagcacagcatcaggtgcctgggaccctggacatcatcgttccactcagcacagcatcaggtgcctgggaccctggacatcatcgttctgctcagcacagcatcaggtgcccgggaccctggacgtcattctgcatcagcacaacatcaccagtgacgagagcctccccaagtggttgacgggaaggatggttcggtcctccagaggcggtggccttctcttcctcgatgacattgccgggctgcaccttgtgagaggccgtcgctgagagtgcagccaaatggaaccatcaggaggggtgtctcgggggtgtcgaaatggtaaacagtagtgggtagttttcagattttgcaatgctgcggtatgtgtcagctttttattttttattttcttttttatttaattttaatttttcttagacagtctcactctgtcacccaggctggagtgcagtgacatgatctcggctcactgcagtctccgcctcccaggttcaagggattctcctgcctcagactccccagtagctgagattacaggcacctgccaccatacctggctaatttttatatttttagtagaaatggggtttcaccatgttgatcaggctggtctcgaactcctgacctcaagtgatccgcccacctcggcctcccaaagttctgggattacaggtgtgagccgccgcgtctggccccgtgtcagcattttaaatttgtaagttgatgcaatgcttattctaaaatatctaattttgtattattataatatatgcatgttatatatttttatatatacacactttttcataaagggctatcaaaatcctataggcttcaggcacaatagatgcccttgcatctactcagagttgattcttctggattattctgtccatgagagaccatatgcatgtcatcagaggatgaacttctcatccaaagctgtgctgttttctgggctggctcagctggaagagatgggggaggggataggttctgatttggaggcatagttttttgttttttgtttttgaggtggagtctcactctatcgcccaggacatctgggagtgcagtggtgacatcttggctcactgcaacctccaccctccgagttcaagcgattctcctgcctcagcctcccaactgggattacaggcacctgccaccgtgcccagctaattttgttttgtatttttagtagagatggggttttaccatcttgggcagtctggtcttgaactcctgatctcgtgatccacccacctcagcctcccaaagtgctgggattacaggcgtgagccaccacgcccggcctggagacatggttttaagggacagctgtgtgctatgtccttgcaggctgctgtgttgacatctgaaagcacagagggactgggctctggacacagctccgagactcctcggtcaagggaacagctggaagaggtttgttctctttgggcagccgtgaacatcgctaggacctccggggaggaagtccagggaaatggtggttgccctgagctcccatccaggactctcagttctcatctttgggatcttgggggcaatgtggctccactttttatttcttactgtaagtgggattatatcaaaacacctaatctaacacagtcagagcgtcagcttttccacagaagtgaatctttagatacctgaagacaagccttctgtcccaaagcgttttacttttcatccttttaatgaaagtgcgcctaaagcggccaggcgcagtggctcacgcctgtcatcctagcactctgggaggccgaggtgggcggatcacctgaggtcaggagttcgagaccagcctggcaaacatggcaaaaccctgtctctaccataaatatgaaaattaactgggcgtggtaacgtgcgcctgcaatctcagctactcgggaggctgaggcaggagaattgcttgaactcgggaggcggaggttgcagtgagccgagatcgtgtcactgcactccaacttggagacagggcaagactccatctcggggtggggaagacctgtatcttggaaagatgatgtaggggtgcactgtaaggggtatattggagggggaattccaggcagcagggagagggctggcgggggctttcctgtgagtgggtaagcaggactgtgagaagggcaaaggcccaggagccatggaggggccaggacagggtggtgagagagagggagcagtgccaccggcttgtccacgtatttcactgaagcctgtgccacgtctgcacatcccacctccacccatccacgcctctgcctgaaccactccattaaccagctggcctctgcttggggtggcccaggggagccgagaggagatggggagggtgggtgaggttaggatatcattctcagacttccttcatcaagcccacaccccaggcctgggtggcgccagctctgtagccaggctcagctctgtcctgtggtctccccacaccctgcccatgtctgtgccaggcccctttcttgggtcctccttgattcctccagcttgaggtccacatcccacctttactccgtccacgcctctcctctgggctgatggtaggatcacaagcatgggtggccccgacacctgaccagcaccgcagaccaggccctgtactaagacatccaggcagatggggaaaaagatgggtggtaccactcccagaacgggaaaccggacagagggcaggttctgttttgtttgtgatggagtcttgttctgtcacccaggctggaatgcagtggcgtgatctcggctcagtacgacctccactcccaggctcaagcaattctcctgcctcagcgtcccaagtagctgggattacaggtgtgtgccaccatgcccgactaaaatttttttgtatttttcgtagagatagggtttcaccaagttgatcaggctggtcttgaactcctgaccttgtgatctacccacctcggcctcccaaagagctgggattacaggcatgagccactgcaaccagccgatacaggtcgttttaaaaacagtattatttgcacaccatacaatttacactactaattctctaagaaacttgggatcacttaactgccctgcccttgaatcttcaacagctcttaaccccccacatagaggacttcctagcctggtgcctgcatatctgtttcttcattcaggcacctcttctcactgagagacctgagcactcgtacggttctctgtgtgacgcctaatatctgactgtagactcatgagttgtatgaagaaaaattacaaggggctttgaggcagtaacagagaggactgactctagaccacagtgttggaattccaaaaaagagaaccaagaatacagagggagaacgccatgaagggctaaaagctgtcccaggattggaggacccaccagtcctgttcaggggatgacaggagactcaccctgacacctccctggggaatttttcactggtgtcacagagaagaccctaaaagcctgcagagatagaacagtttccacacaaagaataagaactgaaatggccataagcttctcaacatcaaaactggagctggcagcttcttggttcctaaagaacatggtctgatctccaagctggaatttgatacccagccaaactgtcaactaggaagaaagaaatttacagacgtacgagagctcacactggcctgtcaggaaccttctgtcaagatgcgatagcagggtgggcttcagatgagaaaaagccagggactggcacatgccctttctgcagacaccacagtcatcctcctgtcctacctgctgttctgcggcagccctgccactcctgtcaagaggtggctgcttggccgggtgccatgtgtaatcccagcacattgggaggctgaggcaggcggatcacctgaggccaggagtttgagaccatcctggccaacatggtgaaaccccgtctctactaaaaatacaaaaattagcggggcgtggtgacgcgtgcctgtaatcccagctactcaggaagctgaggtaggagaatcgcttgaacccgggaggtggaggttgcagtgagccgagattgcacttcagcctgggtgacagagcaagaccctgtttcaaaaaaaaaaagaggtggctgcggatccccttgccttgattgcggctttggagaccgatggaaggaggtggaaatgatggtgtgtggcttctgaggccaggtcagaaaaggcctttgcttctgccagctctctgggagctctggctctcccagtgctcactcttggaacctggcctccatgttcagggaagctcaggccacaccaggaggccacatggacatgtcctgcttgacagtgaccgctaagcccaggttccagtgatcctggccgaggtgccagatgtaggagttaaggagcctcccgatgaccccagcccagctgagcaagtgggcaggaccgcggggataggcagctcccaaaggctccctccccgcggcaggacccctgcatctctgtgggaaaagacaattgttggggccctaaaaaaaacagatttattgattaaaacctcatgcatggccgggcgtggtggttcacggctgtaatcccagcactttgggaggctgaggcacgcaggtcacctggccaacatggggaaaccccatgtctactaaaactacaaaatgtagctgggcaggccgggccggtggcttgacgcctgtaatcccagcactttgggaggccgagcgggtggatcacgaggttaggagattgagaccatcctggctcacagggtgaaaccctgtctccactaaaacatacaaaaatattagccgggcgtggtggcgggcgcctgtagtcccagctactcgggaggctgaggcaggagaatggcttgaacccgggaggcggagcttgcagtgagccgagatcgcgccactgcactgcagcctgggagacagagactccatctcttaaaaacacaaaaaacaaacaataaaaaaacctcacgtcaaatgacttcagcacggactgggctcaggtgcgcacctgctcgtgtgcacgcgtgtgtacccacgtgtatgcatgcatgggcgcgcgtgggcattcctgtgtctcaagtccctttcccaggacatcctggaatcagcagccccaccctgggccgggtcagcgcgtgccatcggagcccccacgtcagcctctctctccgatcggcacctggcrtcccagtgcgcaagccccacgtcatcacgggggccgctgggcccggcctggtctgcagtgtgggaagccggccaggcctgtgaccagcgcccgggccgagggccggacctgcgtccgctgcggggcagggataccgggtccctgcagggagcacaagccccagcgcgcccgcgaagagctgcgcggactcccggctgcttcccccgaatcccgggcgcaggaagcgcgaagccggacgaacgcggggagcgcgcggcgagcccgcctgaggccgcccctcccgccgcccggggtcacgcgccgcgcgctcccgccccgccccgccccgcagcgcctcagccgacaggggcttccgagcgagcagagtcccgcgccccgcactccatggagcagctgctgcgcgccgagctgcgcaccgcgaccctgcgggccttcggcggccccggcgccggctgcatcagcgagggccgagcctacgacacggacgcaggcccagtgttcgtcaaagtcaaccgcaggacgcaggtgctggcccgtgcgcaggcgggggctctgcgggtctctgcggggcctggggaggcggaggggtcgggggcaggcgcatttcctggggctgggcctggggaggggtcagctttggcccttgggaggtggcacctgctgggtgagcccggctcaagcgttctgtgaaggtttgtgtctgcacgatccgtgaccttcctttggcctccatgcgcagcgcacaggcttctaggggtggttttaactttcctatccagcaagcgtcgggggatgtgaggcttggggtccttggctcagctctgggccgcccctctcagcccaccgtcctcctggcagtgggaaagaagcagagacatggctgggcccctggcagggaccccacgggccaggccagcgttctccttcccacaggccttgtctgtgtttagacctgatttctatctcctgctgaaaatagttctgtttaagaatgtatggaaggccgggcgcggtggttcacacctgtaatcccatcactttgggaggccgaggtgagtggatccctgaggtcaggagt

SEQ ID NO: 93665 - DNA, 93741 bp, Homo sapiens
  misc_feature (1)...(93741): n = A,T,C or G
catgtctttttcaggcaaacaggtagagaatgctgaaagacaaagagcctggggtggtctgaataaagcctccctctaaaaaaaggtaaaggttggcagggtatggtgactcacacctgcaatcccagcactttgtgaggctgaggagagcggatcacttgaggtgaggagttagagactagcctggccaacatggcgaaaccccatctctactaaaaatataaaaattagcctggagtgatggtgggagcctgtaatcccagctactcaggaggttgaggcaggataattgcttgaacctgggaggtggaggttgcagagagccgagatcacgccactacactccagccagggcgagagaatgaaactctgcctcaaataataataataataagtaaataaaataaaaaaataaaaaaataaaaaccgtaaaggtatccacatcctgatttgtggaacctgtgaatgttacaggcagaaaaaaaaaaaaagactgggagatttaaaacagaagaggagaaggcgatgtgaccacagaggcagagattggagtgatgtggccatagctgaggaatgcgggcagatggcagaagctggaggaggcctgggaaggattctccgtcagagcctgtggagggaccatagtcctgcggacaccctgacttcaacccagtcaaactgattttggatttcttgttcctggaactgtgagataataaatttatcttgtgttagtctgtgaggtttgtggtaatttgttatagaaggcacaggaaaccatacagggcctcaaatagaatcctgagggacaacatttcagggaccatgagagggagaaagaatgccgaggaggtgaggacaaaccaggagtttggagaaacaaggagtgttccaaggacagacagtggcctggtcccctgacccacgaggccaggagttgtgtgactcatccccatcctgcaaggcctcctctgcttcccttggttccatgccttctcttcctgggcagtggcaccttcagctccagagctgagaaggtccttagggacctctgagaccttggtccaacctctgtcccaatgcaggagtgtctccagggcattccagagggttgtcaatctcgctaaccagccacagatgaaggccagaggtcatggatggtgtcttgatggagagttggggaggggagatgaatgaagacaaaataccgaaatgtgaccaaaatctcacagttcaaaagccactatatagtcagtcaatcaatatacaattagggataacagagatccttacttcttcagaagccagcactttacaaatgctgcaaaatatcttggcaactaatgcatacggtgtgccgccccggtgaggtggctgatccctgcagctgacactcggggattgactgggcagctgtctaggggacagggacccaagggttcttcctgggtgggggggcagggagcagatgcgagctttgcccttgattaaaaccatcyccacttacaggactggtgaagatcagataagctaaggtgtttgcagtcagccctctggaactctcccttccttctagttaatactcagccacaggccagtgtcaaaaggcttctccctggctttgcagtgtgggttgcacgtgctctgcaaactagcaggtaggccaagattcatactgctcctacgccaaaatgcaaactctttttcttggcctaagaggtctgcgggcagatgggacccgcccacctctccaactccacctcccacctgcctacccctggcttaccgccctcacctccctcaccatgagcgggcttctctcagttcttggaatctgccaaactctgttgtgcttgctcttccctctacctgggaagtttttcccatggctggtgccttctcaacttccaaatctcagcttcagtgacacctcctggaagtgccttccttgaccacttcagctaagatgtcccccacaccaaaagcttgttatcatgcattgcctattcttacttcattagtctatcactctacagaattattttatttgcttaccttctcrttggctgtctccctctgcccatccccatgactctcagggtaggttgttaacattgttcctcattctactggtagtacagagcttgaaatataccagatccttgacgagtatttattaaatgtggtaatggctgagggaaggctgtagggacagcctcacagatgaagctcagggctgctgttgccatggcacatgggagagggaggcccaagtggaagcactaaagatcaagggcagggaaaagattctagcccgaggcatgccagggagaggggctgctacaggctaaggccaataaaagcaagtcctggcaaacaggatgctcctcagcctggaaactcattggaaagggcccaaagaagcttctggatgggctagtgggatctccaatggcaaagaagacttctatgctactagatgagccccgaagccttcagatagtggagtcagtatagagggtcagtctatgtaggtgagatctgggaaggtgtatgagagataagggtagtggaggggcccccccaaaatgcccattgactggatgctttcccagaacatcctcactgtcagatctctctacgcagtgggatccctgcatcctttacatagttaatgatccccttttcagtgcatgatacagcccaccagaccatgaaaaacttggagaggagcccagaggcatcttggtgtgatggctaaaggctaatgactatttcatagcctgagattacaggccccataaagtgcttcacagcatttccacagccagcataatatggtggggaagagctctgcctctgagaccaagagcgtaaacccaagtccaagctgtgtgacactggccaagtcacttaacctctttgttcctcatctttaaaatgggcatgatgatagccctatttcagaaggctgtcatgaagcttaaatgagttagcacataaagcactctgaacagtgcctggcgtacagtaaatgctatggaagtgtattgtcgttcaaggaagtagcagtgggctttgaaatagtgttcacaatatcacacagagataacaatgttaattgtgagtccaggctggttgttaagggctggtgggctagtgtagagaattatcttacttcataatctatcacaagcccagtgtgatggaacacggtgagggtggtaagcaagggacagggaggtgggaagtggagttggagaggtgggcagggctcatctgcctgccagacctctcaggtcaagaaaaggaatttgcatttttgcctagcagcgatacaaatcttggcctacctgctagcttgcagattattcataacccacactgtagtcctgaggccagccagggaaattcagagctctggatggttcccaggcttcctgcactcttcagaaaccaacttgccactgcggacagatcataacattccaccgtaacactgtggttggtcaggcagggagttggtgccgaaaactggaatgcacacatttccttctgtagagggatcgtgcttgtgcattggaacaagcatgacaactttttttttttttaattgaaagggtgatgagtaatttcctgtcactgactcctggatcatggttatatttgatatggaagttgtgatcctgacacgtccaataacaaaaacagcaacttcaagcctctagtgactcttagctttaacaaaaagaagggtgcttgattggcaaacccgatcagttatgtgcttttccagatgttggatgctccttttaaaaaaattctgataggagaaaaaagggttccaatcaaaatacatttttattgtcttttacatttacctatgttattatctttatgggtgctcccatttcttcatgtggatttgagttactgtctagtgtcttttcatttcagtctgaaggactccattaggatttctcggagggaagggtgtgctagcaacaaatttgcacaatttttgtttatgtgaataggtcttaatttctctttcagttttgaaggattgattgctttgttgtctaccaaattcttgtttgacagtctcccctccaagtattttgatattgggtggggtttttctaactgctttgtgcctagaaaaaaatgcattaagtgtttgaggctggtgtggctagttaagaccatacgtcatccaactgccttttggtctccatggtttttgatgagaaatcagctgttcattttattgggcagtccttgtttgtgatgagtcctaaatattttctcccattttcctccatgaaagtttatagttttatgttctatattaaatctatgattcattttgaagtaatttttgcataaggtgcaaggtttaggaccatgttcagcttttttccatgatggatccagaactatttgttgaaaagtttgtcctccctccattgaattattgtactgaaataatggtcttcactatccacaccagcctagaagacttttaatgcatttttgtctagtcataaagcaatttaaaaaaccccacccattcaatattttattttgggatttagagattttttgtataagaatcatggtcttcttcttcccccttcttatctttaataagcaacctttcactgtggctatagagagttagaaaaatgtggtggaataggaatgcctagtccataagtctcaaacagtttctaaagagagaggagagataaaaaaacgaaagaaaaggaaaggaaaaggaaggaaaggaaagaaaaaagaaaagaaatagaaaagaaaaagagagagggcctggagttcagcttctaattcatcactttttacttgattaccttggacttatttcctgtctgtaaatggaaacaatactcccttcttcacagactccttgtgataagtgacggctcacaggtcaagctttctgagggggtcctgctgcggctccctttctgccccagggagaggtagcagaccaagcctctttctcctgaaaccagcctctcttcctgaggctggaggaggctggtagcagaggtgtctgcagggagctgggcagctggggagtagatcttggattagtgtgtcaatgggggatgggggtgcctctatgtgctccccatctagcgcccgacactgcacacccgccctgcttgagctctggctgtagagaaagatcagtgaggatgtaaatggattaggaaaagcccgcctggcttcttccggtgccactcagcacctgggtctctggagattagtgggtggcagctttgtcagggagatagacatttaaacatcagctttggtctaaaggccctgcttaccagaagagagggaagagaagactagccctcttgagcctcctccagtttatctgtgaggctgcccctttctgaaacatggggcttatacttctgtctagtgagtcgctctggcacttcaggcaggtgctggagaaaggggtggtactggcaccaaatctgactctacatgtggcagccagagatgaaagatgtgaatcacgtactgcaggcaaaaatgttagctaacttctccagagagagaaggagaggaggccacacactacccaggtgtaggttactctctgcaacagctcgcacccagctgggaggtgctgttctcatgtttcatttggttgttcatttatttattcatttaacctttcatttgggagttttattgtttgtttactcattcactgagaaccgaccagccaacctggtcagtcctccaattaacatttctttaactcctctgtgtgcttggctctgtgcctgaccccagggacccaggtgctgaaaacacagtgccggtgtgcagtagtggccagaccatgcctggctgcaccagagtggcgagtacgggcccggacatgttcctggacattgcagaggccctgtcacatgcatgtctttattgtaggcatgagcctgtcctctgtgacgctggccagcgccctacaggtmaggggtgaagctctgtctgaggaggaaatctggtccctcctgttcctggccgctgagcagctcctggaagacctccgcaayggtaagagagtgtttgggggcagtcaaatcacagggagttgtatgtgaagcttcccacacaaacacagttctggctgctgctgcttttttaaatcaacctctgagagcacagaacaaggttgctgctgcttgatctgtgattactctgaggtattagaatgagtagaagaatagcacctatccttggagctgcactgggagggcaggcctgactcttggacccatgccatgtggcagagtcaaaagaaaggctttgcttctgccttggtgttgcagcatttccaggcatgcaaagctgggaggatttaggaagagagtggctgcagtgctatgggtgtctaacagcacatgggctgtctctgggcataaccagagatgagaggcagggkgtggtcacccaggacacccctacactctgtccaccagatgttgcactagtctgtgccccatcagaaggcagacctggctgggcacggtggctcacacctgtaatcccagcactttgggaggccaaggtgggcagattacctgaggtcaggggtttgggaccagcctggccaacatggtgaaactccatctctattaaaaatacaaaaaaaaaaatttgccaggtatggttgcgctcgcctgtaatctcagctactcgggaggcggagacaggagaatttcctgaacccaggaggcagaggttgtagtgagccaagattgtgccactgccctccagcctgggcaacagagcaagactcatctcaaaaaaaaaaaaaaaaaaaaggcagacctactctgtgttctaaacaggggaggttaatagaaagaattactaaacagtgtttgaagagcaactgtaaggcataagaaaaygctggtgtggtggcttactcatgtaatcccagcactttgggagaccgaggcgggtggatcacctgaggtcaagagttcaataccagcctggccaacatggtgaaaccctgtttctactaaaaatacacacacaaaatattagccgggcgtggtggcgtgcacttataatcccagctacttgggaggctgaggcaggagaatcacttgaacccgggaggcagagattgcactgagctgagatcgcgctattgcactccagcctgggtgacaagagcgcgaaactctgtctcaaaaaaagaaaaagaaaaagaaaatgctagtgggtctcctaaggctgagggcaggtacccagtgagggataaactttgaagggaagcccccttccctgtttggggttcagatctgtgggaggagctgtgcttgcagcccatgatgatggtagaatttgctggtgtgccctgccagaggtggtctgcagtcatggcccaggcaatagccaccggtggccaggtagggagcacgcactgcaggtgggggttggggcgaccctttagggtgtaggtgggctcgggcgagtcacctctctggaggttggtgtgggcaggagggccgctagagtcctgtgtagatttgagaaggtggtcacatgtcaagttccggccttgaggtggccaagtgacctcacatcctgggcatgtgttctgtacagagcccaacctccaggtggcctcacacttgcactaactccagaaactgtgggagagataaggcctcctatagtgtctcttcagagccctctaatgagaaagctgcacactgtgctctcagtaataaggcctcctatagtgtctcttcagagccctctaatragaaagctgcacactgtgctctcagtacaggagagacctaaggtagcggtatccaaggatgactatggggctcctaggcattaaggtccagaacaaatgctgagtacccacactcaggtgtcaactcacaggtcacacrtgcttgggggcttcagtgcatacagcagaggctcctggagtgaaacattacacatgttctgtgagggcgatgggtcccagcatgggcctatggaggaggctgtgcacctgtgccttcagcgtcatcttctccctcttccccaccctggaggttctgatgaacagctacggagctcccagaagaccagctgccttggatcctggtctgtctctagagaactcaggcttgtgctaaattccaggtgtgcctgaccctctctttaccttttaccttgagactcttgggccacagatgaatttaggtgcaggtgctaacttcctggccatggccacagtcaccttttattatacatgttcccatgcatcagggttgaatttattctgttccatgtctcctctgggtcttgctcacattcagtcccagagatgggtactgccaggcacctgctgggcacagtcccatgctggcaccccagatggaagctctgtctctacagccccatcactggcttggtttcagattcctcggactatgtggtytgcccctggtcagccctgctttctgcagctggaagcctttctttccaaggccgtgtttctcatatagaggctgctcctttcaaggcccctgaactgctacagggacagagtgaggatgagcagcctgatgcatctcaggtaagctgtgcagctactctgcaacttctgagtcctgtgccctgggaaaggcctgtcccagcggcagcctccccagctcccagctcagccttgcagagcttggttctcaacaccaagccagagtgggtttcaagagttttattcccaggatttcttgtcaacaacttactagctcatggacaagggcaagtccacttctctgagccccaatttctacattggtaaaatggggttaatgtggcttaattgatcaggttattatcaatattcaaaaagaagtgttgaaaagctgtggttaagtggtctggcacattgttaccattggcagtatgtagcaagacacctcaaaatgacccaacacgtcctcaactaggaatttattctaaggcacaagtaaagataaatttagctgcagcaatgctgattgttgtattgctgacrttagtgataaattgaaaacaagctaaatagtgagtgggagaggacatgagacaaaacaccattaaaatgaggctgtagaagcttatttaatgtattgaaaagaaattcaatatatgtgcacataatattatccaagtttggttagagaggatgaaagagagagagagaggaagttctaaaaatacatacaccaaagtgtctgcggtgattgtttctggatggcaacatcagtggaggtttttggtttttcaacaatggacatgttttgcttctgaacagcagaagtttccmgtaaacatcatttttaatttcaaagagaattttaattctctcaaaggagagaatggtgcaaggcagccacacaacactggatggggcatggtgggtgtttccgcagagagttctgtttcttcttcctcgccctttcatgagaaaagtgcagatgtgaaaatgctgctaccctcgggaggcattctggaatgggagctgctttccctccaggctctgaaaggcagagaatggggatgtggtggtttccagatttggtttgtctgrgtccacatgtctgtaagtcagcccacaaaagtgaaagcataagagttccagttccagtgaccccagctccagcaccccctcccccctgaaatcctggaagtcactctggcatccaggcccacataccttcttacactgccaggaccccaggggtgaatcactgattcctggattggacacagacttgcrtgcctctcaggtctgtttgggactcttggctccacctacactgagttgcctcttatgccctggactcagctaagatgtcacatattgacccctgggactgggatttctgtgtgactgctaaaggaccaygccaatgcaacctgagaatgcmggggagttaccttcttatgggggacacttagccagtggtaaatgagagtctggaggggacctaagaggatacgttttccctcctctttctcttgtggatggctttgtgctgtgcaagccttgcaagctttctagagaagtcctgagtgctaggaagccctgtctgctgcacttcaggctgtgctctgttgcttgttgcaaggagatggccagcattttgaccctgcatatcacattggtccctgtctcccttcccattttctctacactgtcattgccctgggcttgcagcccctgagtgaagggtctgcacttaacccttgcctcaggctccactttctgatgtacctgagctaacacagatttgagtgctcctgaccatcccagtactcactggttaggatcaggcatcaccctcctgattgcaggttggcctccattgagtaccttrtgaaggyccagtcacttctctgcccagagcgtctttgagctggaaaataatatgttccttcctcctgcacactttcctccaggcagaggcacgaggactccagtagattcaagactaataggttgagttaagaactggctaaatgtattgctgagtcctggccaggaagatgagagtgagtgtgagctggaagagatccagtatgagagggactgagctccgaactaaccaaacattggtttagcgctctaggcatatgaagcatggcaagtggagtgggctttaaggggccaaagccaccagcctcaagccctgtttattaggcaaggaggcagagtgaccaggtaacttgatctctttcagcatctctaacactcagttctgttcatcactgttcttttccattcattacaggctcctctcttcatccagtttggcatgggtccatgaggggttggttgggcagctaggagctaggagaatggtccctggacaggctgtgctcagaatcctcccccagtcctgggcctcgttctggtgctgggagggtgtacccagacccctctccttggaccaacrtctgccctaaacagtgcactgacatatttccccaactacttggcatcttagccycaggtgcaggtcaggtggaaggtgtgggcaggtctctaactacaagtcatctgtgctgccagtaccccatcctatgctcatggcagacatcaccaatcaaacatggtgttctttcccactgagccaggagttgccttcaaaatccttctcaccagcctctactggcagtgtctaccagtgagctgaatttagaattttggatgaagccttttgtcactgtggccaaggccttgccctaagacacttttagacagagcccttagaatccaggtgagctcccaggtgtgggtggtgcctctggcagtgctcaggatgctggarctctgtctgcacttcagtccctgcagctccatgagtctctatgctccatcatgctaaccgtgtgggaagaccagccttgcgggtggcagtcactgcaattggttctgggagcttgttgggtaatgagaaagaagtggctgcctaccaagcccctgctcttygggtcctttctctggaaatgggggtgcagcttgtgaactttcttgcatggtatctatgcacgttcatctgaggggtgggagctggtttcaggatataatttcaaacaaagatgagagctaatgagttgtcacaggtgacattgaacacatcttgaccttgagatgtgaacaaccaaaaccaaaaactaaaaycacttgtattaaaccaagtggggggctcaaataactgtgtgtttttacatgcaatgtttcattacctcattgtttccttctaaaatcccaaaaatcatttcctgagaagagagatcttaagggaaatgtgccttgtcagttataatagaagccccacaataaacaccaactgacattgattgaggactggtataatccagaggccatgtagacaagtggggacaattaaagtacctacgtcacaggattgcagtgaggactaaataagtttatatgggtaaaagacttagaacaaggcctggtatattgtaagtgctctatgtccaataataataatggtaacaataataatagttaatattaccaccttcgggtacttttgacttgatctttattagaattcaggcagaatactcatttttaagatgaagaaactgagggtcagagatgtcaaacaatgctcttcccatgacatcattttgcttcttgacaagatatggtgctttgtaatcaggctgamctgtaatgtgtcatggaaacagaaggcctaaaatacaatggccagggccaaagatatggttgttagttactaaacaagaggtctagggattggtcagcagccgtttcatgtcatcaaggatccaggctgtgtatttccattctaccttccccagtggctggctttctgtcctatgcttgctgcctcattgtcacggaatggctgcgaagactccatgtatcaatcacatcaattttgaaggcaggaacaaaggggaaagtgtggggccagtcacatgtgtccttttgtcagtaaagcaaaagccttatcagaagccccctaacagatttctctcacgcctttcaccaaaactgagtgtcatggtttctgctagaaagcaaatttctggctttctagcctccggagtaggaggtaacaagggttaagggagttgcagatggtgctagactcgccagacaacagtgtctgttcatgtggaaattggattgtatttttcttgcagagccatggaataacagagatgattgaaatctaatcatgtactcttcttttgggcagatgcatgtctattctttaggaatgaccctctactggtcagcagggtttcatgttccgccacatcaggtttgtaaacaagatactccaagtcttgccgggctgtgtctctgggtttatttagtggttttctcctgggcagggaccacatttactgagcacacataatgccactctcccgtcctctaggtcctaggcaggcgttgagaacttatcacacaactccttcctgctagtgcagaaacaacctcagaatcccactcaacatagcactccaggcagccacaatttgggactggcaagcaggataagtttggccatctccgctcagaggaagtattaatagcaagctagagaattttatagacactgaagatacagatttacatatattttaaaaaggctttaaaacaacccttcccaaagtgagatgcttccctgaaaaaggcttctgggctcaatagatttgggtaaatgctccctacaatatctccctctcaaagattttttagagtcattttttaaaaactacaagaaggcttaaagcttagaaacttaactttatcctggctggccatggtggctcacgcctatagtcccagcactttgggaggctgaggtgggsagaccacttgagctcaggagttcgagacaagcctggccaacatggcaaaaccctgtctctactacaaatamaaaaattagctgggtgtggtggtgtatgcctatagtcccagctacttgggaggctgaggcatgagaatcgcttaaaccccgggggccgggaggggaaggttgaagtgagtggagatcaaaccactgcactccagcctgggcaacagagcaaaaccctgtctcaaaaaagaactacataaaaatatcctaatattttacacaattttcaactacagaatagaagtgtttgtgtacatttccatctgatactataacaattccttagagactggtgccacaagaacacctgctggagagccctgcctagctgacctggctagactggatccctccctcctcctcccttccttcctgcctttctttctactcaccccgaccctctccaattcaacatccgggctcttcctgggtggtctttctaagagaccagctcacgaccactctcacatgcaaccttttgtaacgcctcactggccgtggggttgccttctgacttctcagtgagacacacctggagcctaggatagggtccctgctcccgtctggttcccctttggcactctgccataatcaggaccggcttcctgggtgtgtgtcctgagtgtgtgaccctgtgtcatagcacagggtcctgcacttagtttaatgctctgctatcactgtcctggaattcttaataattttgaacaagggaccccacattgctattttcccccaggcccctgtcctgctcataatccccttcccttcagatgcatgtcagctcatctgcatcttcgtgcctttgtacacacggatcccttcaccagcacctcactccccactttcctcttggttaactctagccttggctaagccccttcctctacattagtgccatggcctgtgcttcccaaggtgaaagtccttgtcatcctctatggtctttgtctcttttagtgaccgtctctctcatcacaccattattttcctgaaggcagggactgtatctggtgtggctgtgcagcaccaggcacaaaagacgcctggatttactgtgacggcaggactcagcagcttggctgtacacagagataggtgctcacagctgatgctccccagcaagaagcggtagtgcagcctttatctggaaagtgacctgcagtgtgkgttgagcttgagaaaaagtctgattttgaatctgaatttgaggactttctcctatgaattgtggtcatttaaatgcatgagggaaatgcttataagatgcttctgttttcttttgctcgatgtgtacacgtgacataaagttcaaccaacaacgattgagcatttgtgctgactgctggctgttccgaagtgaacaggaataggccacagtctgtatgttccaggagctcacattccaggggaaaggccaagtgagaccccctgagtgaytggatacaatgacaagctacgcaggtgaacttgagtgaaaggctgacctctggtttgatttggggtgcttggcacaggtggaaatccatcttgtcaaagcatctakttttcatgagcattccaagcatgtgcttgggcagaaggatgttctggtttagaaagcagcagacaacacagaattgctgcagagatgattgctccgcactttgcggcctcagtgatggatcttgtgtctgtccttaaactctccagaaggggcaggcatctgctctggtgcttgtgggaacacccgtttccatgtctccaaggcctgcctgacaaggtgctggcctcgtagyggcagctctggctgctctctcctctcaccggccctgtctgcctccagcccctgcagctctgcgagcccctgcactccatcctgctgaccatgtgtgaagaccagcctcacaggcggtgcacgttgcagtcggttctggaagcttgtcgggttcatgagaaagaagtgtctgtctacccagcccctgctggtctccacatcagaaggctggttggcttggttctgggtaccatttctgaggtcagtagagaaccgtgcttttcaagcagtagctgctggtcatgtgtggctattaaaatttgaattagttatattatcattaactaaaataaaataaaaaattaaattaatcagtcacatctgtcacatttcaagtgctccgttgccactcgtagcaggtgatgaccctattgaacagggtggatctagaacattcttgtcattgcagttctattgggcagtgctaacaaagacctttaggcaagccccagtttgtcacatggctaagacccttgacatctttgcaagtgcgtccttacataaagcaataatgtttagaacccatgattcagttttcttatcaaaattcaactctaggttctgcacagaagccttccccgacttcgtttttgtggtccctgggtaccctcccctctgctattttatacctgtggggtgtcctttgttgtgcttgtcacactgtgctgcttgctgccctgtgcactccacagagygcagcaaggggcctggcacatgggaggcatttggcttaggttggattccctccaagctaacccagagacagggattcttgtgcaagttatttactggggaaatgttcctgggagaggggagtgatggtagtacagctgacaagttgaaggatatagtctcagctggagacaggcccagcctggccccctggggagctctgttgcaggaatggcaccatggagttggtcccccatgagacctgagtggagctgggataggatgggcaagtgaggtgcctatggcacaaaatgtaaggaagtttgtatttgggaggaaccagagacaggtaagctagaggccagttgagtggctgcacttgtccagggacaagttggagagctgagagcaggattaatgagggccaaagtggatggagatgtggggacagcagggtggacagcggcaacagtcaatcagagaaggcctctgccatcagagaaggcctccttcttggaccccttctctcttggcataggaacatgtggctcctatgaattgagccagaggatttggtgggggaaatggactatatttatttgaaagatactgaggtctaccatccactggtgtgccattgtccttggrtagacagtgtactgacctgcaacatttccgtcagggatctgcaaggtagatgtcagtcacgtattcaacattcattgggcactgcattaggtgtgctacggtggtgcataaagcacacagagatgttgggggagacagacaagcagcacactcatggaacatgatgcaacagagccaggtgtgagtgcagtgataagggaaggtgatcagacggcagaggtagagaggcttagaagtagaaagcacacagctctgggtcttgtgggcacagaggagcttctggggaggctgtagccatggagggaatgcatgagcaaaggcacagatgtgtgtgagtgtgcaggtctggagtggggagtgaagtgccttcagggtgcatgcagggggtgggcacagagcacattctgggtgccagagaacacatctttaggtcaccgtatagggcagacaattccacattgattcagtctgacagccagtttgcatgtatctataaaaacgccccctccttatcttgggatgtggatgtgtgatgcacttgacccccaggtggagaaaagagttgtggaggaaagctcctctgtgcagcagaacagaagctacctgctcaggaagaggctgcgtgggacaagcagcgagagcccagcggcacaggccccggagtgtctgcatccttgcagaggtgggtacgtgccctaagcagtccctgcgtgggctgatggtacccattctattttttcctgccctgtatgggctacacatccacattgtgatggcagagaaagcctatgtaagtgccactctttcaggaagcccctgaagagaaggggctgagcttaggactcacctgtgttcccaggaaagtcttatttggggacacaacacagttatttatatcaaatgaaaactttaaaaatgagttctaactgtccaagttgagaaaatccaaattgaaacaaacaacaagaaaagaaaaacttgatttttttttcagttattgttctgggtgtgttaaaagagtggtttttggaataatcttcaaatctactgttctctacttttcaactaaatctgagctttttttaaaaaaattaatgttattgtttgttgtctctaaaacaaagtgcactttgccattaggctttatcttcccttgtaaccctccctccaaccctctgtaactgtcatttctgttttctacatgaggaaacagattcagagaggctaaggaatttcaccaaggtcacacagctagtaagtcatgatgccattcatgctctgagatgcctgatttaagaaagccgtgatcttggcttctgcccataccctctaccatgctgcttgattagtttcagaaagaagcacggagacccagagctcaccagagccccattggagcaccttgacacacagtcactgcagcctccttgttaaccggtaagcagcaaggcctaaagggtgctgtgaacttgatgtgagacataggtgtgggggctatggtaccttatttctttactgattattagtaagaagcctcttgctcctccagaaaatgccaatgctattccattaacagatgaagaagccacatttaagcagatccgaagccaagataatgaggggcctggtggcagctgtgctgtcagggcatcctgtttcctctgggaaccatactcaggccgagtggcggagcaacaacatgcctcaatattgttgccattatccattgccataccatgctgcataacaagcaaccacaaaacacagtggctaaaagcaacaattatgaatttagctcatgattctgtgagttggtcatttaggctgtgctcagctgggaggtcttctagactctgctgaaagccttcctgcctttttgactgtcttcggctcggctatccagcttctcctgcggggtgaatggccattgtctgggaagctctggctctcctccaccagcaggtcagcctaggattgttctcgtgacaatggcagaactgacagagaggaactgagagagagagagagagacagagagacagagagaaagaggagagagaggagagaggacggcaaggtgcataaagccttcagaactggtcttccatcatttccacttcattctgttggccatatcaggcctaaaggccagccccatttcaaggagtaagaaatagactccatctcttgatggcaggaggctgcaaagtcggattgcaaagggtgcagatcagggagaagaactgtggacatttttgcaattgtctaacttaggatgcttgaatcagatcaaaacctagatgggctcatatcttcctggacctggaacggtgtttattttgaagtttgggtgatttatttattcacatggtgacctgttgagggctgtaacagtgtcttgtcatagttgatgtcaaatccacagctgacgccctgattggatatcgtagagtttatcttgcaatactttttcctgccatttaaaactttattttcccaatgaaaacaatttttaccccctgattccttaaacaatatattttattgtcaaaatattttgaacaacatatcaaattctaaagaagccagaactgctgcagtcccatgacctgctgggtggttgctctagacctggggtcctggcaccacaaacagagaggtaaagccatggggtggagaagtcgactgtgccttgtacctccaaccccaccccaccccagtggctgtgcagcctggcttctccaggcctcagcttcccccacttgaaaaatggatataactcccccataggtgggggagaaggtgacatgcatcagtgggtgcaccctgcccaactgagcccctgtgcgggtggtctttcatgccatggaagcccttgccrttgctaagtgcttcaccccttctcaacccctggccagcgctcttccaggagcagatccccaggaccagcaggcgggccggaggctcagctctggatctgtgcactcggcagcagacagctcatggccaacaactccttctcagaggggttttctgcaaagaaggagcaaggtaagcaaaataaggctgaaggacactcctcaaggaggcttgagcagggagctgtgggtggctggcacggtggctgaaaatgggcagggtcttctaggggacaacttccctgggctgaggtttataggattggactaacataaacctgaaatttgcaacttagggcataggcattcactgagtagcctcactggggaaggctctatgggggacgctgtataagatgtagggttraagatgctgggtcccaccctagaggaagccaccggtgcgcagggtggtggcagagcgtgctacatgattcgagaactgacaaggcagaatgtgtttggaaggggccttctgcacaggtgaaaggygggagcatagatccagggccgcagggagggcttctatagggaggagagagttatccttccagctggstaaccctaagagggtaatagggttaggcggaatgtgcctgtctgtctgtcaaagttagttaaggtcccttgactgagctgagctccaaatagcctcaggatrtccctcttcctgtttggcctatggttcccatacgctggcctggcccgcactgtcctccttggcccttctctggcctccatgaacttggtggagggcgtgaagagggcttctgagaggctttgtccacctcctttggcttttcttcctgatcactcactagagatacttctattgggaactcttgcaggacacaagtcacttctgggctggaattttggcctcttgggacaagagtcctgctaggtacccttgggggcactatagaagccctacccaaccctatctcttgctggttatatgactcaggtgagcttcttaagcttttttttttttttttaaaggtgaggagcctcaacttcctcacctgtaaaatgggttgagaatatgcaccccacagggggatagctgggtctagctagtgatgggtattgcagtgttttctgggtcaagtgtaatacaaacacactgagaacaagaggtgcccactaagctattgattcaacatctagagctagaaaacatttcagctcatctaaatctaaaagtatttttgttttttcaagtatttttattgcatttatatttatattatacattttatacttttgatacatacaaaagatggagttctgtgtaaattatgaaacttataattcaccccgaacacccctgtacccaacttaagagccagaatgttgctgataccctatacccacctgtaagacttctgctccaagatgtaccattcagctggggcctcagcccaggtcagccccatcttggcctgttttctgctggctctggggaatgtatgctggtgggggctgcagaggtgcatcatgggggaagcccagacccaaagcctggaatctgttgtcttctctaccatatgtgactgttttcctccagttttccaggccagagttcatcctgttggctggagaggccccgatgacactacatctgccgggatcggttgtggtaactactgggctagactgggcagggatggagggtggcgagggaagtgggcagttgcgggaggccaattgtgtctgaatggggtctcacatgggaacaccccagtggcattcagtttcccccagacctctgccagaaccatcactgcctcccactgctgctgttttcccttcagcctgttaaaggggccccacgtgacttccagctgagtcctgctggccctcccagcctcagctagggaatgctgtgaaacatctaccaggtgccaggcactattctaggcccccatctatgctgcgaatgaaacaaagtccttttcatgtggagattacattctagaaggaggcggcaaagacagacaaagacataaatataaaagaatgccaggtagtgatttgtgcaaaaaaaaaaaacaaaaaacaaaaacaaaaaaacaacgaagaagggaggaggatggagcatggcaggtggtaggagggagagtgtgctcttttagataggaaagtggctctggggaggcatcttgtgaacaaagactgggtgaagacaaggagtgagccttgtgggcttttcaggaagggcaaatgctgtgtgggctgtcccttccctgccccagagcctgagcacgtcccctgcagagccccatgtgtggctggtctcaccctgagctccccagaacatatctgtccatgttcaggcccatatctctgttgtccagggcccagttggggccgagagcttctcagtcaatgttgagtatttggatgtgagcctttcccatctccccaacccccagggctggaagcgcacacattgtcaacttggctttctgggcctctgctcagggcctcttggaggcagggcttgagtggggcatggctagaggctctcccctcccaggctcctgcatcgccctccacttgtccttcctgccctgaagagcaccaatgagcccacctctggctcactccagcaaaatcccattgaatcccagcttccatgcacccccctgtcaaggggatgtctgttgcagtgcactgacatcatttcctctacacctgagtcctgaaagtgttgaagcaaactggtcagtgcacgtgggatgcctgcctgacaggggcctccaattcctatgcaatgaccagctgcatcaatttatgcagcacacgctgacgggcacccactgtgtgcctggtccacctgcatgggcacaaaaaatatgaagtgggatgataacttttacaccccaggtatgcaagattgagttacccaaagcatgaaaatactaaagctaaggaggctggtgtgtgaggggctggggtgtcagggtggctcactctgggggtctacaaccttctgaggacacttcctgtatggggcttgcaagtcagagggccatggcctcctcagcccagtcccacctctgcccatccccttcaagccacctgccctcagctgaggggaagaagggacaattcacccagggaccccttcctgacatccctgtggtcacatggcttaggtgactggagactcctctacccaccgggtagatgggccagacctgctgtgatgggggccagcttcccccgctctgcagggatgcttgtgcagtgcttaggtaccaagactccaggcgatgggaacagtgctattgtcccagttctgtctggggcgagcatcttgacctacacaccaggtctaggaccctagttataatcctcagaggggaccttggacccttgcctctaggaagatgcaagaagggtatgagggtgactgagggctccctcagtaaaatactttttagacctctgtcccttacctgggaaacaggaggccccattcccagggtttcctgtgtcactctgtttgtctggcttgggctggagcatttgcccctgttgctttagcccctcctttcctgtccccagggttctcagtcagtgtagctccctatctctccctccaagtggagttcttggtacacacaccctttccttctgcttccctgtgggtgttgggaacaaaacagattccccttacagcatggctgtcccgtgggaaacactggcaactaggctcactgaaacatgaagaggcagcaccctgtgttcaaaagcagccaccacaggaactaaaatataaaacattttcttttttctctatatgtgctttctctgtctcatcatgtcatggtatttttattttttatttgctgtttaatgtcacattctcttgggcatagggatattcacaaggtgaacagagacccttgcaggtacctgggaccctgctctgtgactttgccacaccagttgctggatccatgcaccatgccccacgcagggtgaaaaagcccaagctcccttcccatgactctgctgtcccagcccagacaatcagtggtcccccaaggggttacaccctttgcatggagatgcgtttggtacctggcttgggagctgggtgggtgagatgcttgtccctgctgaattgcccagggaaagagctttggtgctcctggcccagggtggggacagccactgtcatggttgctctgacatgccttgggtgcgtgtgcctgcatgggacctttcctccaccagcccctgaggaaggcatcactagggggcagtgagagccatggctgccctcagtggagggcagcagaggtcactgtgtggggaggatgaaggggcaggggaggctgggcaaggcatggggattcagagagcagaggagttggcagccagaaccctccaaggaggaggggaggcaggactgctgaaagtcaaagctttgtatactcgctcattgtcctggggacttcactcagaaaacacacattccaaacacaactattaagagtgtccagagggcagcttcagagcactggacccaagcaggggcccattatgggcatacgattcatcactgagggcctgggcagccctctcaggaagcagctgggatttctgcaagggaaagaagcgggtcagacctgcctcccagccttcctggctctcgcaaaatcaccttgggaagctttactagatattgatttcctaggccttgtgccagactgacagaaccatcttgggagtggtctcctcacctctcaggtgactcaggtgtgcagcaagtgtaggaaccaaggtggcatggagtatgcctgtgtgatcagccctgcccagcggcatgtgtgaaaccccctcccacagggtcctcagatctgctctggcccctggagtgcataggctgcccctgggtgccaggagtgtcagggtatgaccacaggcatggtctcgatggcactaaggccacatatgctagtgtctgtccatgactgccttctagagagaacttcctgggggaggtccaggctgggctttgggacatggggatactcaggaagagccacagacaagggctccagagcctgacctgacagatccataagagtttgccacatggggagggagtggaagagccctaggggcagtgggtatcatatgtgcaaagacacagacagaatggcccaggtggctgcctggtgatgaactatccaggaggctgaaccaaggcaacagtggtctgggtggggctgtggtgggagatgaagaggcagaaggcagactctggaggctctttggctctgccgacccatttctagagtctaggtaatccccttgctccagctctgtctcttcattggatctgcacccacccaaattctctctgaagtttagaattaattaacctgtgctctgctgggacctggggagacaatgtcagatcgacagattgatccagggccatatgattcattgatgagggccctgggtgaccctcttaggaagcagagcccaagggagagctggaatttccgcatgggaaagacgtcagtcagacaggcctcccagctttcctggcccctgctgagcctggcagaaggctcagatttgagtccagttcctgccttacaaactgtgcaaaccctaggcaagactcttaccatttctgagccttagtttctcatctgctgcataggaattgtaaatatacttatcttttagagttgtcaattaaatgagacaatgtgtgtaaagtgcttagtacagtaaccagcacacactaaaggctcaatgacttataattgtagtataattgatactrttgttgttttcagaccaaaaaagggaaatcctatttggctctcagggacctctgtgtggtcctgctgaacgggcagcacctggaggtaaaatgtgatgttgaatcaacagtgggagctgtcttcaatgccgtgacatcctttgccaacctcgaggaactcacctactttggcttggcrtatatgaaaagtaagcatctcttgggcagctcacagctggcctggkgcctctggtaacccaggtatctgggtacctgagctctgtttcttctgggaaaactgtttgagacttgggtgcctccctttgtatgcctagacattagtcagcatgacgagggcttcaagtactcatggataaagcatcaagcaagtgcagaaggttgtcaggaaataatgagtgtaagatgtgggtttctgtggcttgctggatctggttgattgatctcagggcactgaagttagacaaacaagcaaatgttaaaagcatttccatctaatgatgcaggactaatggggacttagtaccctgaccctaggagctaattaagactccattctaaatatccaagaaaaagggtttctataccctcttccctctctgacgttctattagagactctttatttctgctgtcgacctaaaatgacagtggagagagacaggctctccaaaaaatgagtgtatttgggaattagcaggagattgcaatctaggatccacatgccatagtgaactatagatgcatctaaggaggttgggcaagggcaagcctttatagacaaagagagaagtacatgtgagttgttttgaaacaaaaaggtgattggttccaagggcttatttcaggagttgacaccagttcattagtgaaaacagtgtcaggcaagtgttcttgtgtgagtggcgagctgcccttgtgtggcgagctgtccttgtgctgctggctgtccttgtgtgactcatgtagcaagctgtggtttggaaaaaagtttctatggtatttttcattataggcatagagcatgagtgaccctcccttatggcctcccagctccattttagtagggttaaatataagtgacttattttggtattgataatgtttacatttctcccttttgatcaagttattgctctgaaagcatcactgctggatcatcctgtggttaggttttgattgttcctcggtactgggatggacctttcctggttgttctactctcacgttgaagggaaatgaccagcaagtaggagttgatgtaaaaacatctttcagcttcatttaagcaacatggaggtttggaaagagtggctctgaggctaagtctgtctggagttcattgttctgtttcataggtgttggttgtcatttcgaagcactagaccagcgttgggcattttggtgaactctctatgtagcctgcacatcaggcaggagacttgttcctagaattttacattgagttgttgttcagcttcagtttatagggctttaggaacagagaagttcttgttctttgttcttcagatactgaaggaagcaagaagaattcagggtccaattcagtctacaggtagattagaaacacacaaaagcaatgaacagggctacagtcagataacaggtgtaatacaattttcaccttcctttagaagcataatttcttttctacagttacccccatttttactaaagataatcacaataagacaaatttgtttactaagtaagtttagcctcatcaagtttggccttgatgcataagtgcatcaagaatagtggttgaccacgtaggctcctttgaagcttgttytgctagaacttttgataagaatctcagcctgacttttaaaagtctctcaaggctaggaggccaaatcaagacaaacctcagtttggctgaagtaactttatgtgcattttcaaatatgacatccaagtcaaagccttagtaatataaccaattttaagtattgtatcctgttataaagagagcatattttattgaacttatataaataactatattatcataaaaataagaatgcttatggatagttttagaattctggttggatcaggaaaggagaaaaagcaaatattttaattttgttcacaagagtatactttattatattgttgtaaactatagataacatacaaggaaaaagtttccttaaatctagaaaacaaaacatttaaaraaccagtgaaatttcaagtaaaaattataaaaacccattattctttttcatccgttcgttcagcctcatgtaattaattcttgttctgcttgatctttgttagcagtttcacaaactctgtttcttctttagtgtcctggacatttttccttagtccaatggtttgatcttgaagttatcagaaacctgtaacttgtcagaattctttccatcctttctgtgaacctccttgaagaaaaagcaatttttggactgtagctgattgcaaatgcgtttagaaaagtaccaacaccataacattccatggatgataaggacttagaatggccatggttaaaaatctgaagagagtttattataaccagcaatttacagataaatttcattgtttctatggcatatatcattttaacataataaccaaatattatactaagacatatcggaattctagcaattttgtacaattttaggaacatttatatcaaaactatatttataaatataacttaaagatttggcaccacttattattggataatgtttcccatgcattttaacatattgaataaacccaattagtttaacacctcttttacaaggtgagggacatatcctttgttgcttccaagggcccagctggaaagacccaaagtaaattcaaggtcaaaaagactcaatttagaatttgattttgggaagctgtcaaaactgtcaaaaggtttaaaacccttgatcaaagtagaatcactggtcactgtaaaataattgtcattcatttaaccagagtgataattaaaattcttcaaaaggcaaatacataayggtcaaaacttagctctttgaatattgagaagatcacttttttaagtaataaaagagctaataaaatacagcacagagcacaagaaactattctgataaaacacaaaatttttgttttctaggccaattactaaaaagttaaggaaaaacatattaatattaacagtagaggctaatactgcaatataactgtattttattaacagagaagacaaaataatagttttgcacaagtatgctattgatattaaggctcaattttagaaaaacataaataaatacttttcttctaattttaattatcttgatcacacaaaaatttctttcataatattcatcttccataaaccttttgcaattttctcaaaccatttataatgttcttattcagttttattgayatcacttttttctttatttatttgttttgaagcaatcctcaactagcctccaactagagaaaattacttttttaaacgacaacaaataaaaacacattctcatatcttccttttaacttttctcacccaaacatatcttacatttttgtacactttgtgtacagaattacatttagtaattggaattttaaaactcttggtaactttaatttctagtgaaaaccagaaaactagaaagtaagcaatcataaactgccttttacaaatttgtgaaaacattattttataacacctagaaatatatgcttcctcatagcacattttttcagtgtagaatagagcattttaattaacagacccaaatatcttttgttcctctacaatgaggagacaaaagtatataagcttaaacttatgttcaacaactaatatttcagcataatatcttatttggaagtggtctattaaatgaatattcatcatttcatttaacttactataactgtaatgttttaagtaaccaaaaagattttataaaccattttaagtagatatatcttataaaacataatcattgttgaaaagcttacttatactctatttcatttatatttacatttattaattcacttggttttaacaattatgtttgaattgtttataaaaactccataagacatgaaacaaatgtagtcattatcttacgttatttttattgttagtaaatcaggcaagtattaaaaaataccacagaagcaaagaacctaaaagttaaaacatatggctttttttaactctcttttttcattgtcacatttgtctcacatcaagcaatttatttttactgtatgttttattcttaggttacatttacaattttaccatcttaaacatacatacgcttttgcttgataaatccagatagaagaagtcgtatgtctgtattatgtttaatgttgacaagtctccaaacatgactattttaattgaaccaaaaaacttaaactagcttctatatttaccaaaaattataccagatcacctgaamtmaaaaaacatttaggttagttctgtttttctgagaaaacagttaatttataaaagtgtttattttcttccttcaagccaaatcttctcgcatgtaccaataggacagttgttcatgatgagggctctctaaaaatacttttagatacaaaagtccaaatatccaaaggtataaccacttcaattgtgactcaaagccaataagccttttatgtcttaaccatggatacgagaggcttccacaaaaagagcgtgaaaaatgcagtacccccctcgagatccaacatctctcccaaagacgaaaaacaaagaccttacttgttaacaaggtagtggaggttgaaacaattgagacaaattcccctgggagctggcactctgggacaaggagatgcttcatgtttcagactcctagccagctggctcgccatctgatgcaaacctgacagtctccaccacccagctggtggagaccagagaagatatcctcactggctacagagctcttgagacataaaacaagatgaaaggagagtcttattgtaacttttatccttgtggtaaatcacacagaagacagagattaaaaaacaaaaaaaaagagcgatttctgttagaacctagaaccaaattcacaagagtcacaattcagagaacaaccttacaaatgtttttytcctgccaattcaaatttagaaaagaagggacaagaaaaaatttttaccttcttctcttagctaggcactatccatagatatttgggaaagctggctttggaaagaatccccccaccttttgcaggcttttgtcaggcctytcagcatctcatccataggctggagtgagtggggtgtccagcctcttagggtcccatcctcattgccagaaactgtaaggaaggaaaacttytacttccatcctttatcctcacaggctccagctgtgtctgagaaataaactaacataagaaagatcaacaggagaaaagcataataaatgttttatgtggcatgggagcccccataagaagatgaagactccaccaaattagttactgggttggacaaaaaacagttaattgtgaaaatgggactaaattatgaggaggcttaaaagatcagagttattccaacaaggtctgtatggtattctgtgtctaaacttcttgtccttgaagataaggatgttgcctttccttccaggagagggaggatgactatcacatgggaatttcatcttctttaagaaataacacaagggtcaaagtggccaatttgcacctgctcttaaaagtgcgcttaaaagtgcctttaacttaaatagctgataggcccaaatggcatattttaacttctttattccacccatctagaacttccctagaagattcacatattaaaaaatgacttggtggtcatggagagaagaattagattagtagctgagcagtttggaaaaaagaggagttcggctagaggaagacaaagaggaggaggaattgtagataggggagggaaggttctggagacaaatgagtctcagctagctttgagatatttgcattaaggcatttttgagtcctgaatgcgttttgaagcctcaagatgccaattgaaatatgtgccccattcaaactgaccttatagctgcagtcttctaattttaattctaaggaaaaaacaagcttgggcagttcaaatggtctccatctggccattggagctctaaattatctttggtataatttgtccataagcttaaaaattcatggggtgaattatgtttggaaagtctatgtgatgccaatttaaattctgtacacaaacaaccaaccccaaaagagtacacatcagaaaggatgccaaatcccctacaaaagtgaaaccaaaagaatactcagaagaaggaccatgtccttcagacctataaaaccagatctcgaatcaagtcaaagcaagccaaaatgagggtgctcaaatccaagacagaacttagcaccagcagaaagatgattcctggaagcagagagcacaatgggctccagtgggcactgcacgtgttctgcggtcgctggtatgggaaaaggcttgtcatttttggatcccacatctctaacaccaggttttgccaacctaaaataacaacaaagagagacaggctttccaaagaaagagtttattctggaattagcaggagattgcaatccgggatatgcatgttctagaggactacaggtgcatcccaggaggctgggggaaggggaagcttttaaagacaaaagagagaagtacatgtgagttgttttgagacaaaaagatgatttttttctaggggcttattgcaggagttgacatcagttcatcagtggagacagagtgtcaggcaagtgttcttgtgtgagtggctagctgtccttgtgcggctggctgtccttgtgctgctggctatccttgtgtgactcatgtagcaagctgtagaatggaaaacatttcctgtggtatttttcggtataggcatatgcatgagtgcccctccctcatggccttttggctgcactttatcagggttagacataaatgacctcattttggtattgataactttcacaccattactataaataccatgctgccacagctggatttctttaaccactgtgtggaggctgagctgggatcacactggccttctggcgaaatcctctccctcccagcccatctggcttaggcgtcatatctcagtgttcctctattttcccatttccagtaggaaaagctcacgaacttgtatgattattctttgtaccaagcagggctggtgagagcatgttcttatccccatagttctcatcagaycttctaaagatctctctcacaaataagaacaactgttatatgctttgatgtgatcaattgatatttgctcgacctttcataacctgtgaatacaggtgtctttaggaattgtgttgttattgatccataaaatgcaatctaatccagtgtgcttgcattgtgagtgcacctgcactcacaaatccacttatctcctacctgccttctcccaatcaggtggccatcctgagcccctcccacatggacaattttacacctgcctagctagggtcatcttggggaaatcactcaaaggtgactacctctagggtttggatatagaccaacttgggagggattaccaaccaacctttggtggggaactgcctatctcttggggagaattcatcctaagggaagggtgagtcccgtgtggggcatcagattcagcagtaagggcagaggcaggtggcagaggggatggaggtctgagtgtggtgtggtgacagctgtttaaatcctggacaccccctccccaccccagcatgcataggcattggaagaagaggttggtcaccagtttaaaagttctgccttccaaaactgggcaggactcctgtgcccaggcaagctgctagagaatgctttgggctgaaagggtggagcactgagaaggaggagccactttgagtgtgtggtagaacagggcaggggcagacctgcagcagtccccaggagtggcccagggcactggaggggttgagctttgctgtgaagagagcagaggggtgggggaggggccttcagtggctggggctgattcagtctccctcccaggggtactggaggacacacttgccaggatttgaagtcctgagcttgggttggtggaattttcaatctggaaccacttgggtcaaagggcaaattgactccacttacaccatgccttaggcagctcaggctgctctaacaaaataccacagaggggatggctcaaaaatagacccttctttctcacagctctggaggttggaaagtccaataacagggttccagctgatttccattcctggtggggtcctctttctggctttcagaggtttccttttcgcagtgtcctcacatggctgagagaggaagctctggtgtcttcctcctgttataaggatgctgatcccatcatgggggacccatactcatgatctcatctaaacatagttacctcctaaacaccccacttcctaatgccatcagattgggtgttagggtttcaacatatggatttgggaggacacacatatttggactgtaggagtccatggctggggaggagggggttggtacagctgaggtggagggttctggcacattgcacaaacttagtcaaactcctttccttggttttccattttatacccatgagatgatagctgaaggcagatattaagcgacatcttgtaagataagataactaacggtattttctcctcttggtgttgagttttccttatttgaccctctcctctttgtctgctccttcttgacaccccatgaccccaacaaaggttccttgctaccaggtacgcaaagacttacctcccactcctgcactcacccagctcgtgtgtgacactctgggtagggcttagggctatgagtctgagagatggtgcaatccctactgcttctccttccacacatgctctatttccatttcaggcaaagagttctttttcctggacagtgaaaccagattgtgcaaaatagctcctgaaggctggagagagcagcctcagaagacctccatgaataccttcacactcttcctgaggataaagttctttgtcagccactatgggctgctccagtgagtgctgcaaacctgttcatttgttccttaagggatttatgtatgtccaggctgacggagaggtaatggatcgacaagtgctttgcaaactgtaaattacatacaaataacaatagctattgtggttggttttctgttgattggattctgatcaagatagaacaaaggaggaaaatcagtttttttatgcaggccctggtcagaatgagaatatgccctttgtttcagacatactccactcaaggtcaaaattctctgtctgtgaccccaaaatgccccctcacccccaacacacaactcagcagcccagtcatgagggttggaggacagagacatgggtttgcagtttgatccctgcktctttatttctttgtttattagaaacaccaccgaactggttattagcttcctcactcaaaccagagcaagaaacacctctgtaagtttgtatgaagtgactggcatagagtggccctaaacgaggggcaggaggcatggtataaatgcaggagaccacacttgtcttgctggcattgcctctgaattctattgagttgcatctcgtcttccctacttttccaacttcccacactgagaaaacccactggtgctaacattctccctttcccttagcaacccagccctttttattgctacttcttttccaggcacagcctgacaaggcaccagttttacctgcagcttcggaaagatatcctggaggagaggctgtactgcaatgaagagatactgctgcagctgggggtccttgccttgcaggctgagtttggcaattaccctaaggaggtaggggtgaacaccaggggcctttgtgtggggtcactggaaaaacagttacaggatgagggcatgtgttagtaatgtggagactctgctttgagtattgttagcatctaccagctagattggagtaaactacatttatccatccatccatccatccatccatccatccatccatccatccatccacctattcattgattcatccatccactcatctacctattcacctgtctatcattccatccatccatccatccacccacctacctattcatatatccatccatctatccatccatccatccatccatccatccatccatccatccatccatccaaccatccatccatccacccacccacccacctattcatctatccattgatctatcctcccatccatccatccatccactcacccacccatctacccatccatccacccatccatctacctatccatccatctacccacccagccacccacacacccatccacctattcatccagaaagcattcactgagctctctttgctaggctctgggaggcacaaagatgaataaatccagtttatactcagtaatatagttctagtctagttctagtccaataggtacctcctaaagacagtaatttactaatttattgaattcctatcataatcaccatcatcaatagtaatagccaacctttatttttaaaatttatttatattaatttattcattttatttcaataggcttttggagaacaggtggtgtttggttacatgaataagttttttagtgttgattactgaaattttggtgcattcatcacctgagcagtgtacactgcacccaacatgtagtcttttatccctcatcctcccaaccctttccccaagtccccaaagtccattgtatcattcttatgttttcrcattctcatagcttagctcgcacttatgagtgagaacatatgatgtttggtttcccattcctgagttacttcacttagaataatggtctctaattccacctaggctgctgtgaatgccattatgtcattcctttttatggaatgagtggataaagaaattgtggtatatatatacatataccactcattgattgatgggtatttgggctggttccatatttttgcaattgggaattgtgctgctataaacatgcgtgtgcaagtatcttttatgtataataacttcttttcctctgggtagatactcagtagtgggattgctagttcaaatggtagttctacttttagttctttaaggactctccacactgctttccatagtggttgtactagcttacattcccaccagcagtataaaagtgttccctttttaccacatccatgccaacatctatcattttttgattttttggttatggccgttcttgcaggagtgaggtggtaccacattgtggttttgatttgcatttccttgatcattagtgatgtggagcattttttcatgtgtttgttgaccatttgtatatcttcttttgagaattgtctattcatgtccttagtctactttctgatgaaatcgtttgcttttttcttgctgatttgtttgagttctttgtaggttctggatattagtcctttgttggatgtatagattgcaaagattttctcctattttgtgggttgtgtttttactctgctgattgcttcttttgctgtgcagaagctttttagtttaattaagacccatctatttatctttgtttttgttacatttgcttttggattcttggtcatgaagtctttgtctaagccaatatccagaagggtttttctggtgttatcttctcaaatttttatgttttcaggttttagatttaagtctttgatccatcttgagttgatttttgtataaggtgagagatgaggatccagtttcattcttctgtgtgtggctagccaattatcccagcaccatttgttgaatagggtgtcctttcccctctttatgtttttgtttgctttgtcaaaaatcaattgattgtaagtatttggctttatttctgggatttctattttgttccattggtctatatgcctatttttataccagtaccatgctgttctggtgactatggccttatggtgtagtttgaagtcaggtaatgtaatgtctccagatttgttctttttggttagtcttgctttgaatagtaatagccaacctttattaaaagatcactatgtacctggcatttacccagacattgtcgatttatgttaactcacttagctcttgcagcaacattgtaagttggtgtgataatatcatagagttgatattatcactcaattttctagaagagtgatctgaagttcatgtggctagtacattgtaaagtctaaatttgagcccagacgtgttactccaaggccaatactgatttttctgggatacactcttctcaaatggcaatcctaatcttggccaagcccttgcccctgcagcagaatcatatgcaagtttctttgatttaactgccaatgatagtcctctgttataatcctcagggagttaatagtgttagtaacttgttatttaatgttcagatgcctattaatagggaaggattatgctaatgtatttacctacctaattatgatttaaaatggggacacaaggcaggaaggagaaaccaaccacttgagctgttatgacagcagtgtaattttgctgttggggtttatgaagcacttccctcatctcttgcccatgttctggatgaagggaaaggcttgggaacagacctcaacagagaccgagcagtgtgacccagcagtgtgacatgacatctgaatgtggagtccatctctgggtgtatcagtaggagcagagaggaaggagcaagggaggggaagtctccaccaatctcttccctggtgacctcccagccagcatgctgggctttaccttggagagcactcaccactgtcatgtgacaaaagctgggtgccactggggaatgcttagcttggagaagagatggtcttcttcaagaggactgcatgaaggaggaattcactgctaaaaaaaaaaaaaagaaagaaagaaatgttaaccacacacactccacccttctgccccagaaatcttcaaaaggacctttaaatccttgagatcctaagaactggcatgttactgagcctttgaatgccctttcccataatgtctgcacatccgtctcaaccttatatacctttcaaggtcagtaccaaccccctagagttcctggccccacaagtggaccctctggatactttttcgcatcctcccatacctttggccagcacaggtgattggacagcattctgttgattagaagtgatagaaaatcaagctcaggctggcttgaataaaacatgtcatttattgtcttgcaaaattgaagggttctggttctttctcagcctcccagcatccctgtgacaagcttccagcccaatcactcttactttggagcctgggtgataggaactcacatgatgtcagtaggacttgggcttcttgtgtctctgagctgtgctctcctctgtcacatttgcctttcatggctttccaattccactctccaggttccagccctgtgcaagagagagagtctctcccttggaaatggcatggaaatcctgggcttctttcccattggtgctgatagagtcatgtgcccacctgaagccaatcattgtgtagggagatgttatgctttgattggttagacttgagtctaaccccatggtcaccctaggaggcagggatagagctcacactgccaagtgcatagactgagagggaggaaggatggtttcccatttcctccttcaaaaagaaagtgaatagtcacatgtggccagaaatacatgtccaccaccagtgggcacttagtggtcagagatgctacatcattggtgaataaaggagccatgtttacctaaagttctagtctgctacgtcatcggggtctggccttatgttataggctgagtcttgagccccaaaattcatatgtagaacccctaattaacagtacttggagttagggcctttaaaaaggtgattaatttgagatgaggctgttagggtgggccctaatccaatctgactggtgcccttataagaagaagaaatttggacacacaaagaaacaccatggaggcacaagtacagaggaaaggccatgtgaggacacagggagaagggggctttctgcaagccaaggagagagtccttgggagaaaccaaacctgcagaagccttggtcttggacttccagtccccagaactatgagaaaatgaacttctattgtttaagccccctagttagtatttgttatggcaaccctagtagattagtacaccctgagtctgagaaggaggaacagtagccaccactgggtgtggacaccttcgcagagttctgtgtcttattcctcacagggtatgtgggatagagagggagggctgtgagtgaccttggttataacttgcctgccttggttctggaactggattaaagagcaaggacaagcccaacagttaaaacagtgagaacagtgggttgtaaaattttttttgccatgtcccatggataaatggacattaraacccaacacctacacatgtatatagaacagaactgaagcaaaaacctcaggaaayaaggagcatcctttytatatgcaatgcacattgatatctcctattatattctcattcgttttaaaaatgctgattatgggcccctaaattgattcatagctcaccaattggttacagactgcggtttgaaaacacttctcagactctcccaacattgtcttgctttcctcccggtacagcttcagaaggcgctgctgtgtcctggggtcttcaaagtccctgtgtattccctcaccctgctgggtttttgttcacagcatttgtcatcatgtgggatgatgaattcattttattggtcattagcatagaaaacacctgagggtaagggtgtttttgtctgtttggtgtagccatttatccagcaccaaagcagtacttgaagcgcagggagtttgttcaagagctgtgaatgaatggagttgaaactcccggactggaagacactacagataacagtaatccatcagaacatcagcagctggcttgtcaggggactgtatagttcaattcccctctgtcccctctcctgggactaccctggtccatggatactggaacttcactttctgcccctgacactgccccagggaggcagtgtctcagagctggcctggccctcttaacctcctccctgcccttttgacaatccctgtcactgcttacccttgaactccttcctgccctcagtacccaggcctggggcccttttcatgcctaggccagcttcgggtggtgctacattgggaagtcctgggaggagggtgctctaagccaggagtgtcccagtgaatcagttgacattcttgctgtggcctctggttcagtagctatatggccttggcatgttttctctctgagccttggctttttcatctgcaaaatggaaaataatcatcaatctcttgcaaaactgctgtaagggtgaaagatggcaattcatgtgtggtatctagcatgtgacaactgctgcttgcaagctttccttctacctcctccagcattatagtgctctgatataaaatgacacaactgctaaccttcagtctgtagattcagatacaggatgtcaaacctgagtttaactctagcacttagagttgttggggacagcaggccagatccactggaggcaggtgggagtttgagtaatagtctcttactcagacctggagtcagtccagcagagtctcttgccccagggttccaggggcccagacctgtctctatgagcctataatagtctaggttctctagagaaacagaactgataagatatccatctatttatcatctatctatctatctatctatctatctatctatctatctatccatcatctatgtatctatcatctgcctatgtatctgtctattatctatctgtcatctatatgtctttctgtctgtctatctagagatgtattagaaggcattggctcatgtggttatgtaggctgagaagcctcaagctgtgtagttagcaggctgtaaacccgggagggccaatggtgcagttccagtccaagcctgaatccaaaggcaagagaagaactggcatgaagagagtcaggcagagaggagctgcttctctacaggagggtcagtctttttgtttaattcagtccttcaacagattgaatgaggtacattcactttagggagggccatctgctttactcagtctatggatttaactgtcagtcatgtccaaaaacaccctcacagtcacacccagaatatttgaccaaatatctgggcaccccatggcccagtcaagttgacacataaaatggaccagcaccaacactccattatggtgctttcctgtgcccgtccagtttctgactgatctcaccctgcttctggcttagtgtcatctcattctccttctgcttccccatccccagatcctgccaagccttaacctgtctagtgccctgaggacatttctgaggtgctctctgctgcccccatgtggcccccaaaggcagacctttttcctttctcacgtatgtaaaggccaacaggtttacacaaacccattcatttatacaaccacttagtcttaatttatgggaggcctgctctgggcttggcaccattgaattcttaaatcaacccggaaaagccggtgctatttacatttgccattgagaaagttgtgactctgtgaggttaggtaagctagaaagagcgcaaccagggctcacttcacattgctttgctatatgccaggtgctgcaatggacacttcaaaggtcattgagtgaggcctcagagaggagagcccctctctgtgtcactgaatgggcaagaggagaagtctggcctgtccgctgcctgagcctcggtggctgtgaagctgggtgggggccacctgttatatctgggaagacttagtgtggcctcctaaggggcttatgttttgtttgataaatggttctggtgctgaaaaaaaataatttggaaaccactgttgtgaaagattgggagcccctgaagaattttaaacagggaagcaacatgattacatttgcattttaaaaagggagacaaagacaatttagtataaaaataaatctccttaatcacatcatcacagcagaataactttcctctgggtgcattctctccctgccttgatcacatgcgggggtttttacacagttgtgaacttcaccacattcaatttgcattctttctcactcaatggtacatgtcctccggtggccttcctagtgatcctctggattggcagcctgccatgccttcccagtcttccttcacttcttcattcttgtattgtggggtattcacccagtagcaccatgtaagtgataactactattattatcatttaaattgcgtctgatttttctgttttataaatgccataaaaataagtgtacttgaccgcagagctttttcagtcccatatggacttttctcttggatatattcctaccagaaggatcctggatcaaagatcctaaacacttaaaaaaagttttaatagactttaatgtttggagaatttttagattcacagtaaatttgaattgaaaatacagggatttttcatatatcccttgcccctctacatgcacagccttctcctacagacaccataaaaatcctgcaccagaatgtacatttgttacaatcaatgaacctacattgacacaccattaccactgagagctcatagtttacactgaggtttactcttgatgttgtacattctatgggttttgacaaatgtataaagacatgtatctaccattatgctattgttgaagtcaaatagaatatggagatgaatctctaaatttaaaacaatttatttgggaagcaagaattgcagtttggggtatactcacagactgggtggtctttggtgtgtctcacgaacagagagaacgttgggatttttattaggaataaaaatgttatagttttgaaagaaaactcatcagcacttgagaagcttttgggaactgaaaactgattggtaagtgacagtgggaggtaaaacaagtcttagagtcccagcagatcttttcggcagctactaggtaaaactggtcttagggttacagcaagtcctttcagtagttgggcttatggaaaaatttaattcttggagcaggtgctatgtgccccgagttcattttcttcctggctcccggtctctgatttagttggatatgacaagaattactcaatttgtataaccaactttcaagtatcttacagagtaatttcatggccctaaaaatcctctgtgctccacttatttatttctccctgcctccaaactcctgatctttttatacttccatagttttgcattttccagaatatcatatagttatgatcatacagtaagtagcctttacagacctacttctttcacctagtaatatgcatttcagactcttccatgtcttttcaaggcttgacagctcattttttttttagcactggacaatatttcattgtctggatgtaacagtttatttatccattcacccactgagggacatcatttgcttccaagttttggcaattatgaataaggctgttataaacatctgtgtgcaggtttttgtgtggacataagttctcaactccttttggtaattaccaaggagcaaattgctcaatcatatggtaagcatatgtttagttttatgaaaaacaaccaaactgtattctaaaatggctgtaccattttgcaatcccaccagcaacgactgagagttcctgttgttccacatcctcaccagcatggtgttgccagtgttctggaatttggccatgctaagagcattctaaatgcttttttatgcactagcctgctgaacaatatctctctgtttgtggtggagctgagctcaaaaccagcatgggccagcaccaacctgaggattcttggtccatggccacatggggacatgctacatcaggagtgtgggaggtagtggacactrtgctcttctcttcagataccccactcaggccaactcattcacccccagccccagtgaggccagattctcccagctcccacytgccttcctcatgagtaactgccctcaactggagggaaatggcttgcccagggttaggctgggaaaggcttcctgagaccaggacatgttgatctgggaatacaaaggcagggtcagcttctccctctgcctgatcctgcattcctcattctgtatagtggacctcaagatcactcctgcatggacttctgcagacttttacctgccccagagtctgtgttcagggaactcaccatcaagcagtgagtgattccacctgccaccctctcctggggggatgcagcctcagtctcccaaagaacagacttgatgaaggtgggctgggggtatccagtctccccttttccagggggctactccttgaacaccttcatgtgcagcaatgatgccaaagctaagacctccttggtgagaagagacaatgttctgggagtgcatgtagacagaaatgctaaatgaattaaaaaaaaaacaacatagagttttagggccagggttttgctatgccttttggtaaggtgtggcatcgtggaaagtgtgagggtttgaggtgaacacatcttgtttctgtcacttccaagtggtgtgatcttcgccctgttgagtgacctctctccttgcttgtcttgtcaatggcaatgacaatgccatcttcagagtattcctgtgagaatcagaaaagccttatgtgttctgtgaactacctggcataaaaaggggctcaaaaacagctcctttactctctcttttctgttcatgtcctagggtttggccccgtttttaatatagtagaaaataatatcccaggtgggcacctcgaggaagtgtctttctctggcgccctcctggaattgtgactacagataatgttttcattcctctcagagtcccccggccagtgtctggattgtgcccttcccttctacatcttacttccagcaggtggagagtaagccatactttcacgttgaagattacatcccagcgagtctgatcgagaggatgaccgctctacgggtccaggttgaagtctcagagatgcaccggctcagctctgcactgtggggagaggatgctgagctgragttcttgagggtaaggccttcctgacctggagagaggtgttggtcttcaagggaatgcagccagcaatcccctccagagccttctcaaggggcccaggtgtgtgcagacccacaaggaggcatgagcaagggtggaactctaggaggcagggaggggcaaggagaggcttctggaagcagctggcattggaaatgaccccaaagagggtaggatttagtgagctggggtgggtgtggtagggcttttccttattttttattttatttatttatttttttgagatggagtctcgctctgggattacaggcgcctgccaccatacccagctaatttttgtattttagtagagacagggttttcccatgttggccaggctggtctcaaactcctgaccttaggtgatccacctgccttggcctcccaaagtgctgggactacaggtgggagccactgtgcccggacaaatcttagatcagcattccagacactttcctccaagcagggagaccacatttcttatagttgacacataggacaacrgaagtacaagatcagcgcttgagccagagaaaagccatcacaagaccctaagtttgcagccctgcaggcagcagtcctcaacatagcacagctgctgtggcctgtgcacaggagtgcagcttgggcccaccgtctcttcaccagcggggcaaaaacagtggcactgcagtctccccgtgtgggcacacacaatgatgaatagtctttgctactccacaatctccccttgctgtgggccaggcactggaaaatggagacaaaaagcacatgctctttgtccccaggaagccccatgtcttgtggggaggactgcggtctacccacaggcacacaactcaataaacactcaatggaacaagaacaataccagctactctatgtcaagatgtggggaccagggagagagtggctactctgcctgtgcagatacagctgggggataagtgcgaggacactcgcagcttccccaggatgggatacaagctgggccatttgattgggggagcagttttaaaaggaagttaggagatttgtgtatttccctgtacagaagtcaggtagaaatattccatctgtgttttcttgcccttaattgagatgggtacttgaaaacagaacagccaacatgaggttgggcctttgcttttcagctggtcattttgcagaactatccctgtatctaacatggtgtagcctgcaagcgtttcatttgagaagcactggcgaagcatgatcagggcactccatagtccgggctgcacacgtgttccctgtcaaggggacgaagcattcccttgatgagggaccagtggggacttcaaagccatctgataatgagtggtcacagagccacagaactgcagaacccaatctagaggccaaggacccaaccctgcggcagatgtctgcaggatggacgctaccttctggcctctgcccagaccctgactttgagtgctgatctcactgtcagggtccctcgcttcctggttgaaygatgaaaaatgattgtaaaagaaactaccaggctgagaagcaaaaatacagaaaaccatttttttccccattcacagaaagcactgaatagatttgattccatttacatgtaatctttatcggtttcaaggagcactcttgcttttgcagtttcccttggtaaactggttggggttgttaatgctggtgttgcctgcctgtggtacagagagataaactagacagggctttgtcatcatccccagagcacattgggagcctctcattaggatgagggtttgttaaaggttttctccccctccctgattataaaagtaaacatttcctcataattctgccgcctggagatagcacagttacatttaggtatattcatccttctctctttgttctgtgcattcatatatatatgtatatgcatatatatttaaaattagctttatattatacatgcacttttatgtatgtatataatcccatagatctaaacatttgaaaacttcttttgaattaacatatattgtactctaattttttctctcaatgctctattgtttaacatataaatggtttccaatatgggactatttaaaacaatactgaggttagcatcttttccatataaatcttagctgtatttctgcttcattccttagggatagaatctcataagtggaattacagggtggaaggtaataaacattttgaacgttgttgatatatattgctaagacacctcgtgcagccgtcatttctggacattttccatctcttctactgggctataaatgcctggaaggccgtggatcctcagtgcccatcacagagcccagttactattctacaagcaatcactggattatttaattatagctcctcatggctcttgtttttcattagaaaaaggagaagaccattattgggaggctagctcttggtccccagttcactgatgactaactctgaaagttcagcaccttgtactagccacagactgggcaaaagtccagtttgggaagcgctgaataccatagtctgtctgtagattcacaactatattagcttattaatctcagaataacctgtttaaggtgaattcagtgttttcctaacttcctcaaccatggagccattttcccacatagctgtgggttgttaatatattattaaaagatttttttcttgctattgaaatcataatgattgtatcctgtagtttcttccacttagcattataacaaatgcactctcctgataattacaaatgctttacaaatatcctttgtaaaggctgcctgataatcaattttaagacagtactgtttttaggaaatcgtttactgccaggagctggtttccccaaatcaccccacaaatctgtactgaacagcattatgagaaggggttgtcctgattattcagcatattttcttagggtagatacccacaggtggagttataaggtcagagaagatgaattctgaaccccttgatgaatattcagaaataacaatccatttgttttgaagaatgttcaatgcagcaagggatgtgtggctggcagccaggagtgcttggtcccatctcaactttgctacctgttgtaaggaagacaggccttgtagtaagatggcccaaagcacatggagaggaaatgaccctctgaaaggacacccagcaatagcaatgcaaagggggccaggagaagcatcctaggagactccctagcagacagcaaatggaggtagacatcattattttattgttttacagattgaagatgtcattgacaacattaagtgtattcacctatgtttccaggccttttggattccctgtatttcagttgttaagagtgaagactcaggagcaaacaggctcatctttccatatttccattcctggctccaaagcaggaacttggacagattacttagaaaaaggatagcttcactatctctgtgattgttctgaagattaaataataatgaaatcatgctgggagaggcttagcatggtgctttactagtaggaatcttgaggcccagagaactgaaaagcatcgtatctctctttgtataggtaaacaataaattaaaatataaactaatactaaacaactgaagaagtttaagtctagcaaaggcatgacttttattaatgacttttaatgactacttattaatgcttaatttttaaaagaaatatcacaccaaattctttaaaagcgtctgcctattatcttgtggtggccctgctttttaaactttaatcacatgcccaggctggccactggatatttcagcaccagcgctcaataaatattgatttgtatgatgataaggatattgatgatgatgatgatgataatgatgatgatgacgatgatgacagggtctctccaaagttaaacgaaggaggcttagggttcagaaatgtaatctgaaccctgtgtgaagagctgtggagtctgcaggcagcatagctgtctgcatggacttcatcaacggtgaatgggaaaggagcctgagagaggagctctcaaaagccataatttgtccctgtttttgtgaccttgcctgggggtgagagagattggataggacattatgctctctggttgggggtaggaatgggataccagatttcagcaatacaacccttctgagagggcttcaaatgcctggagcaagaggtccttgctgtgggtcccagagacacatcaaccttctgatggggactggcgtcttcctggtgaagatgaaggtgggaaagttactgccattcagatgtagaaacatttgtgttcattttatactttggtctcttaagaagttggtggcctaacgcagtccccagctccaactgacccatggcccctggcaaaatttattcccctaacctggtaaacagaggcaagaccctgggctacggggacccccacgaaggcattgctacatggtgaggagcaccaaaatgaatggtcattttctctgcagggtggttcacaactaacattggtgatctggaaggtcactttctgtgccttagcctcagtttttctatctgtcacgtaaagggattggaacagagaatactatagactctgacacaacaaggaaaagaaatctcttaccttgagatgtcccagaagagtatgaattctaaaaaacttgttcagaatattattattgtactgtgttattttcataataactgtattctaagtactgttttaggtattccatgagaaaagtattccttgggttacaaaaaaaaaaaaaaaggaaaattctatcatatcagaggtgcagagaaattttgtacatagcaaataaatctgtttgacccagtgtttcctaaacttacatgacaattctactctttcttttcagaacgcctatcagtgtgttttgcatggagtgaatggcgtgaggcccattattttaaaccatgtgcctgtctcttctaaatcagcctttttctgctccaggtcactcagcagctcccagaatacggtgtgctggttcaccaagtattctcagagaagaggaggccagaagaggagatggccctggggatctgtgccaagggtgtcatagtctatgaagtgaaaaacaacagcagaattgcaatgttacggtttcagtggagagaaaccgggaagatttctacttatgtgagtgtagctcagttgataaataacctgcacttcattttcctttgatttgttggccgtttaaaggagcagtgggtcatgggtcatgtggctttctcctgaccaaacattctcacagcctgtctgtttgttaacctgcattctgatgcattgcaggatatttggaagaagtctgccaagggattttgggaggtcctcaggaggccatttcttccctaacattccttgcctggacctccacatatccccatgaacagccattggtctaaagggctacactttccttctgggtaaagttttcttaatttggagactccattaacgttgagagcaaagttggaggtgggagatgggggttgagagtgtagtttaggttgagtggagcctgaaaggttttgaaacttcttcccgtgttttaattttccctttgcacgcagtgtgccaaggcctctggtctgtctctgaggactacaggtgtgctacgggacactgaggattgcaaatttttggtagctcttaaaagtttcaaagtctatttttgaatagaaaatccccattaagtatacaacatttggaatctacttgaacactatttgcatgcatatttctgcctcctgaagtgagtcactctggcactgtaccctggtggctgacagcctctgcctgtcctgtggttgttttagtcagtacctgtgtcacttcagtgacgatttattataaaatatgaagttctttatcttgcggcccctgaaaaaatgtttttttcctatttaattttctcaatggttaaaaacattttctaattacatcactatttgtatcattatctgatgttagagtttcctgagtagaacataattgctttcattcattttcaggatgtttcttttatttcttccatcttggctttgaagttaacacattgtcaagataaaatttcataataaattattgtttgttttcaggaaaaaagcttacatctaaaaataaataataattgagcacaatttaattgagtttattcaagtggtctgtatattatcaggaaattgactttttttcaaattattttgaccaaactcagatgaaacaatattcatatttgtgaatttttcagaattttaattactcaaattacattaactaaactgaaagtttatatgaagaactttgtttaatgaatttaatactactacattacttattttcttattgcatgtttaattgttcagatttttcaatgcactatttcaaaatattcataaaaatgcaggtaacctaaaaagtaattttttaaaatggatttttttgaagctgtaaagctcgacagtccccttaagtaagtactttatgtatacattggtttaacttttacaggtatttatttccccccaccaggggatttcttgattaaattagttgattaatttcttgattaaaactgggaagtcatcaggctctgaagacaaacttagtagctcaaaaaatacttaatcagggtttccattctctgatgatcatcctcttccttggcatgaataacttatttttaaggaacagtcgtcagatgaagtaatgtcaccagcagtttgctgcaaaccaagcatcttacgcagaaaatgacttgaactctttatgcttctgtaagcacaaaatagggaattcagtgaacaatatgaaaattaactcaggaaactggtttcaattttgctttttaatacctgaggccaaaagtcttcaaacaattacagatcgttcatcttgccagcctgcaccaaagcagcaaaggaaatagagaaagatgacatttccaaagaatatgattcgtagatgtgttggcgtccatgtgtggtttgattgttcaatcaaaaacctgttccttctagaacaataaacctatgcatgctagtaactgtccatagttatcascactagttaaatctctgaagagaaatgcatggaaacagaagcagacacacgctatttagggccctctttatgaaaaagaatacaaagttacaaaagatggcatgaaagaaatatttattcagaatgagaaaagaaatcacaaaaactttatgaatttttaaaagctgaacaaatcctgcagatatcaaaaaagccagcaantaatatttttattaacttcctgacaatgcctataatacttttttcctttcaaatttttaatggcgtaccctgattatttttctgtatgatggcgcttttgtaatatcattttctctagagaggatagaaatatagtttagtttttcttctagcatggtggattgaaatctgtttttattattgaaaggattaataggatgcatgaaacacgcagctttgcacagaaacatttttgctctttctagtgctgcaacagagttatttgctgcaaatgcaggaaacctgacaaattctatttcatgggattcccataaaaaaaawcgtgtcatgtgttgataatgcggtatacacaattatagagtatatccctgatagggaagcatttcaattagatgagtatttttgagaactaaattatagtttttcatttctgatgagtgcaaaaacttcctgtagatcagctactggctctgtacagctcatgcttccttcgggggctgggtattatagggcatggtcaatttcatctggctgctggccctgcacctttctgctgagattttaggtgagttagacaaatggaaggagtattctgggatggctagcaataaagtaactattctagaaaagccttcaaatcacctaaataaatccaactaaatctaaaccaagtgtatccccatctcaacttcttaaagggttctgctctgtatcacccaacaccacctggtgcgaagggacgtggcaaggagggtgtgtctgagtagaaagagtcagtggtcttaaccaactggggtgaaaacatcttactttccgtgtattataagaccatgtgaatgcattgccagggctcctcccaggaagttagggccctggagcttcagtttcattagtttcatgacaagtctcccctgcctagaaaaatgttatttgtatttcatacaaagatgtatcaaatacaaataatcaagcaggtgaacaaatagcaacagaaaaaaaagaactcctagggatgaaaatattcaaaatggtaaactgatgctttgaaaccaacatgttacagaagcacctgccatgaattaggtgggtgcaagagtaatggcgcccacctaattgcagtaattgcaccaacctaatgtttctgctgcaaccacagaaatgtaaagaaaggatttcatgctggtgctgaaaacccagagactggagttatacatcatcgtatacacagagtagcagcttgcttatgcgaaagtttgcagataagaattttccattaaatgatggaaaagactcttgacagtcaagactcttttcacctttatgtcaagaaataggatcagcattccactctggtgtttgataccttggagcactggcatctgaaaaggagagttttgctgagagtttataagctaaaagaaacttcgatgtatgtgtttgtttgtatgtgggtgtgtgaatgattctcccttttcagatttgttaaaaaatagttattacattttaaaaagtgatttattcttgcaaggcacagtggctcacccctgtaatcccagcactttcagaggctgaggaggatcacttaactccaggagttcgagagcagcctgggcaacagagcgatacccctgtctctaaaaaatacaaaaattagctgggtatggtggtgcctcactgtggtcccaactacttgggaggctgaggtgcgaggattgcttgaacccagcacttcaaggtatcagtgaactatgattgtgtcactgcactccagcctgggtgacagagcgaaaccctgtctcaaaaaaagagtgacttattcatataaaaaatgcttaatatctgaataaacttaatataaaattgtcaggattgcatgaaagcctatcagtgtgtactgacaaagtgtatggatttcaagcaaatattcgactttgaaaaagtgtggatgaaatgatcagttgagtactaaagaagaattattacgactggcggagcagcatctatgaatgcttgagacaacacattatttaaagaaatattagttatagtacagttcaattggattcagaatccattcctattagcacaaggaggcttagcactatacttgtcagtaaaagtaaagagtatacagagaatgagaaacttatctaaaattaggttaatggtaaaaaggggtttctcaaagaaaaagcaatgaatatttatctgccttttgttgatatctgacatgcgtgaatggagtttcttagaaatggtgactatcaggaattaaaagagataagccttaaagaggatcaggggtttccggaagccctttcaagcataagccctgtttctataaagttacctttataggagcaagctgaaggttcttattgaaatagatagaatatctagaatgaagattttatttggaagttttatatgaattaatatttaatatcacctatatattttattgttcttatcagaataatatattgcaaaaatttgtacttttttttcataaggctctatacaggtagcctcatataggtcatcttcaccagtttagcccagtgagctggacaaatattatcactttgtatgtgggccttgaaggtataatgtggggaagcgtttctttgtggtgtgacctcaattcctgtggcattttgaggactcttgctctttttttttttatctgtagaataaaaatactgatagaatctctcttattctgtagttgtgaagataaaataaattcatactcataaagcacttagaatagaacctgctacattatagccagaaatattataacacacaggtgtttttatctttttcataacccaactagttgagattttgtctacaacttcttggagtttgtacaataaaaacaatgggaatacttagtggcttgtcataatgcacactgagggttaggttccgtccttgctgaggtcaatatacctgacccacttcatattcttctcacccagcacactccttgaaaaatagttattgtttgataaacaatttgattgatgaatgaaggaaaaactaaaaagagggattttctttaagctaaggaaaatatcaggccatagtcagacagcatctgccatgcacccgtggatgcctgctacagggtgtggaaccaagggaccgagcattttcttgcagttgtgcgtcagtggagggttgtggatgatcagtgtattaaagtctgtgtttgcttccttcagcaaaaaaagttcaccatcacaagcagtgtcactgggaagaagcacacatttgtcacagattcagccaagaccagtaaatacttactggacctctgctcagcccagcatgggtttaatgcacagatgggctctgggcagccttcccatgttttatttggtgagtagaagctgtattctccatatacactttgacaagtttgttatttcataaaataatttgtataaatagatacaattgatctggggacctctaatagagttgtaaatctctctaataatgacagaaatacaataaaaatgaaatacagttttattttctcatgttggcaagcactaaaataaataacactgggaggataaattgatatgatcttttcagagtgcaattggaaatatacatcaaaagccttaaaaagtgcacgtcctcttggccccataattttacttgtagatagacatttatcctaagataatcaatagagacatacacaaaagttgctgcccatggatgtctactagggtgtcatttatgacagtgaccatttgaaagcaatctaagtatccaaacatagaagaccagataaataaaccaagagcatctatataattcagacagtaaaatcagtttttggacaatgatgatatgtgaaactgtacatgatagggtgctaagtgaggaaaaggaagttctaagactgtatctagctagcaccgtccaatgacactttcttcaatgatggaaatacctgcattgttcagtgtgggagtcactagcaacacagacctatcatgaacaaaagttcttggaaaaggaattcgaaggaaaaagactttattcctgtcacagtctgcaaacccagaaggcacaaccttggtataaaacaaaggtgtgttctggagaacaaagagagggtttggcttttatagataaaactcccacctaggttcccaatcaagttcatttattcaaatgaaagattcaaacttgcttagttcagattggttgatgcggtgcagttctgactagttgatacagctgagccctgattcgaggaggcaggtgagctctgattggttggttcaggtgagctctgcaagtcccaatgttaaacagaagggtggttcttcaaggaactcagagtacctgtgtgacctctagtcagcaaatggttgcttggctctgttttatttatttatttatttatttatttatttatttatttatttatttatattttttagcttttagtttttatttacttatgaaacataaagcaattttgggcaaaaggtaacaaataaaccttgaaatttcaatggcttaatacagcaaaggtttgtttctcaggtgcttcttggtctggctattttgcagctctcctccagcgacatggggtctcggctgcttcagtggagagctccattatctagaataattactccagaaaggaaagagaaagctgtaaaattgcacaagatgttttaagagccagaccccaaagtgactcatattccttccatctgcatttcattaacagaacacagtcacatggcccccaagacaactgcaagacgggttggaaagggaggacttcctgtgtgcccaggaagaggaagtagtgtaacgatacaccatggtccttgccataacggctgcagccgtctgctgtatcactcttaattgagagtttggtattaaactcatagcaggaccagattacggaagaggcagagtttatcatttgtgtttagattggaatccttgcaaggaaaaacattaaaatgtttctgcaatacacataatctagagatcaggtggacagcatggtgacctgaatgcagcacagttgaagattaactaccaacaagaataacaatgaatgtcctattaaatagccctggaagcacctgtaccaatcaggaagctatttgctgctgcttagcaattacagtgagaaatgtaactcatcacattctcctacttttkgttgcttagcagatcttttgcttactgtgcttctaaattcaaaaactataaatacccttgttttaccaggaccatatcttaaaaatttaaggtaccttgtagagtagggtttttttttttttttgcctgaactcattttttcagaaaaatttcaacttttattttagatgcagggggtacatgtgcagatttgttaaatgggaatattatgtgatgctgagaggtttggagtatggatccggtcacactggtagtgagcatagtacctgataggtagttttctaacccatctcaccttcctccaccctctagtagtccacagtgtctattgttcccatatttatgtctatgtctgatcaatgtttagctcctgcttataaggaagaacatgcagtatttgattttctgttcctgcgttaatttgcttaggattatggcttccagctcaatccatgttactgtatacaaaatcaatgtacaaacatcagtagcatctctatacaccaacagcatctcaggctgagagtgaaatcaagaacacaatcccacttaaacaatagccacaaagaaaatgaaatacccaggaatacagctaatcaggaaggtgaacaatctctacaaagagaactacaaaacactactgaaagaaatcagagatgacacaaataaatggaaaaacattctatgcttatggattggaagaatcaatgttgtaaaaataaccatattgcccaaagcaatttacagattcaatgctattcctatcaaactaccaatgtcattcttcacagaattagaaaaaaaaactattctaaaattcatatgggacctaaaaagagcctgaatagccaaagcaatctattttaaatttgggcccagttagctgctcagaatccatcttgagggactggctctttcaggttcacatttgttcacactattgggcacttcaaaggtggcaaaaagaactgggggattaaatttycamtgttatttaattttcttccatttatatttaaatttaaatggccacatgtgcctactgtattgaatagcatagttatagatagacacacaacactaatttggttaatattgtgttttaagataaggaagaatacagaaatgaactgcaccaaaatgttactgttattacctttgggagttaggcatgcaggcacgactgttttctctgtgatacttttttgatatttattaaacttacaacaatgaatgtgtattattgttataactaagagtaagactattggttaaaatggggcacacatcacataagacaagttaatatttatggagcatttacgaagtgctatggagctatttactattgttattactaatttttcctggtgttatgctaagtacttacactaattacctcccttatgttcataatttactgttttctcaaactgccctggtcaagcagccccaggaggcaggtaccagcattatggggaggagcaaactgaggcttggaaaagttaagtaatgtgctggctgcttggtggtgggcctagccaaggtttgaacctgtggctgttggggcccagtgcctgtactatggcctttcataaccagccagagcatggaattcagtgctagagagacttggttctgcgcactggctttaccacagctgctgtcaatgtctaggcattagttcttctttggccataaaagggagcaatataatatagtggtttacacccttcatgttcagagcgtggttcctggagctgcagcatgcatgtcatctgggagcttgcaaaggatgcagaatctcagtccccactccagaccatctgaatctgaatctgccttttaaaaagaacccaagtgatttaaatgtacatataagcttcagaaacactaacttggaatgtggcctgtggagtccagtagactcaggggagtgccactttctagctgtgtgactttgggcagctcacttcccctttcagagctggagtgtcctcattggagcacacagaccgtactgtaggtttgtattgtgctcgagtgggaaggtgtgtgcgtgtaacatttctagctcagtgtctggtgttctgtgctcagtgtgagagtagtaatggtggctcctgctcacgggggttttgttcagtgccagccaattcatatgggagctgtgtcattgggtcctggggctggcccaggagttggggtcaactgggaaacaaaattgctgaactttcagatgcagaaccaaatgcagaaaataatggtagcttattttattatttgcagcagaaccagatgaacatataaacatttcattgaaaccacaggctggtggttccaggatatttccagggagctggagatgacaaatgtaaattaattatacctgacttacctgctattgctgagaacagtgtgtgaaacaccattgatattgcttttattgcctgatttcagtgactgtaaaatatttataaatatttcatgagctcacttgtaaaattagtcctttcaggcctatttggcttgtaataggctgttttctcaaactgcacattctactgtcttaggagtttttaggaatctaacatttatttgcattgaaaggatgagtttagacaaagttcccttgctttttaaaatatttcttcattttagaaactctctctgcagattcatgtaacccttttcagcgattacatgcagccgagaactgaccgcctccagctgatggtcccacacacccctcaagctcagggcatccgtaattgatctcttcctctcacacacctctctttgccatgatatgtcttgtacaaaggtggtcacccagcctccctgcaggaaactgggagtgtctgggcctgcaccctctcttcccaccccacttgtcaccaaaaacagacagagagagatgtcaaagctgggggaacccaacacatctcatatccttgaaatggaggcacgtcacataatggacttgctgctggtactcttgtcctggataattgtccttctcagccttcagagtgacctttcaaaaggaccaatcctgtcattttcttccatgctgaaaacttgttaatggctctctgttgtctgcaaggacaagctcaaacttcttctagaatggcatgccagacacttcccactcagtccccagtcctgccatattctttgccctgactcctcctctctggtctctggctgtttttcatgccagcttgcaggctgttcagcacaccaggatggctcagcttccagggcttttgtgcccagcataccctctgcctgcagcacgttcctaactccttcctggctcagaccaccaagataagtccgatcctctgtaaataagcttaagggtaacctcatccttgaaggctttcctgattgactgcccccaggtggctcttcctaggtggatggaccactccctctgctgtgcagacctctgtcttctcacctgtattattctgccacttttatttgtggatatgcctgcctgcagtcagcagtggactgggagttccacaagagcagctccagcacagaacagaggtgtggtgtgtcaaatgggaagtggttaatacatgttttttgatgaacgaatggatgatttgtgtggaattacaataatttactgaacccttcccatttttgatatttagtttactttttgtttttaagtattacaaataatatgataaatatcactggaagaaatatttttctatattttatatcatttcttttagctagatctcagaagtgtaattgttgggtaccagtgctgggcatttttctaagactactgctgttttcccaagtgccaatctcaagcccagtattgtcttgcctgttttgttgcatccttgttggaataaatatcatcgtgtttatctttgttcatttgaaggtaaaagtgatttctcgctgtggctttattttgcagtcctttgattcttgagcagttgagcactttccaagtgcttcttagtcattcttctgtgaattatctcaataagcatattactttatagttatatttggttctgtagggggaaaagatagatcactgagcttttacaaatgcataatttcaggactaaataggcaggatctgtcagccctgtggagtggggcccatgggcctttgctcagctgtttctcatgggtggtctgggggctacagggttggtctcagcccttccacaagaaggctgcaagactgcagatttgcagtgagctgcccagaatcttgtcctgggtgtcttttccttgtggcccttggctcagagtatatcctgtgtccttatgacactgtaagtgacttggactttgcccttgacatccagatggattcagccttatttccctagtgccacaattatgctatgagtcacccacagcagggaatagaaactgtccactgtcctcagcttgctagtggctttgggacattcgtggcaatgcttccttccattcttgaaaggctgtctacttttggctctaccaccttccaacaaatcccccctccactgtttgtccacccagtcagccccatgaagctgaggcgtggcgatgacactggcactcaccagcagccccaccagcccacagctgtaggctgagtccctgatgctgagtgcttgacacccagggtctcatttcctgacctcactaagcagcccctctcctgctaactgagcttcctcctcaggctccaggcactctccagcatctcacaggcccttgagctctctctcctctgctaacttttgtgagtcccctgcctctaagggatggctccttcctgtaatcacagtctctgtacagtcttgcttcaaactcgctaaacctttctgagctgcgaccttgcctccactgtctctgcctagaatatccgcctgtgggtattaatatccatcatgattaagtctaaggtcactctccctttgggccccggtaaacagaaggctgggtgtgtctcagataaatctcccctgctgctgtcattgtctttgtgtcctcagcatccccattttccagcgtggactgtggagtctgcagatttgagtgtgagtctgccctaccacttactggctttgggaccatgagcaaataattaacacactcttagccccaagttccatgatctttaaattgggtataataatatytaccccatagggttattgtgaggattaaatgagacaatgcagataatgtgcttcccaccacgcctggcacatagtaagcattcagcaaatattagtagttgatgttgacattactgctgttgttgctgtttctgagcaagcccaagctctgtatggagtaagatactatgcaatttgtgcaaaagctgcaggtcacatttaatttacttatattccttcattgctttttgcctactgtatgtgagtgatggtaccatagtgcctcatgcatgcagaaaattctcaaaaagtttttttttaaaaggctggctttttcagtaagcacagccctggcagggaaccagacaccattgtagagaagagaggggggtctgtttgaagaaatatatgcccatggatatccttgaaatggaggcacttcaccaggctctagaagtgcatgtgcacacacacacacacatacacacacagagaaaccaggagccacaccactaccatgtgtctgaccgttctttccttcttggttttagcaaggcgcagatggtcagaatgtagtcatcattttcctgtcttaaaatrctaacttggctttatgtaaagcctcattaacttaaaagctctatttttcaaatcccattttttttatgatcaatgtgaatagtgaagtggggagttaatcacatccatggtcttaagttcaagacttcatcaaagttatttattaaacatttctgcatggaaggagaaaggcaagtgtcaaagctggggggaacccaacacatctcatattatatttcaggaaataggaccttgtattaaatatgattaccagggcaaactacgctgtgtagagattaaaggttatactccacagagcagagcctaatcttgggatcccaggagatttggaggcacatttgctacaagaatgtttgggaggacagatctgtaaaagcagaaagcagaaggggatggggcagctgatttcgcaggaggctcggccggagcccgacacacccgcaaatactctagggttagcacccatttaaacaggctctttggctctgcgtcctgtcagctgcaaggggagagagagcatctcgtctcttccttcttctgtttctgaggtttctttcattagcaagtgctaattaggagaccttgcattcccagggataatcacaggagacaaaatagcagcagaaaaagaaaggaggaggagagcgggggcccagtgatatgttacaaccaccagagcaatggatccagcatcatycttgtgtgtgtgtatgtctatgtttttctccccaaattcagaccatgataagtttgtgcaaatggccaatttgagtcctgcacaccaggcccggtctaagcctctcatttggattcagagattgtcatgctcagaaaacgagttgtttgtatccaggcttcagggtgctgcaggaggcctgctgagtacatcaatggataacttcaacgtggacggcagcaaggaggctggagcagaaggcatcgggcgcaggtgggtgtgacacatttgttctctgggcccaaaccaccatgtgcttgatggtttgcagtgatctgtactgaagatttattttattttttttttgagactgagttttgctcttgttgcccaggctggaggagtgcagtggcgtgatcttggctcaccgcaacctcagccttccaggttcaagcgattctcctgcctcagcctcctgagtagctgggattacaggcatgcactgccacaccctgctaatttttatatttttagtagagacagggattctccatgttggtcaggctggtctcaacctgaggtccagacctcaggtgatccaccctcctcggcctcccaaagtgctaggattacaggcatgagccaccaagcctggccaagaaattgtttaaacgatgttagatgtctaggaaaagtgtatatttattgggtaactgtcaatcaattccacagagatttacagaaggccatctatgggctaagtctatgttaaacactctagggccaacctctcattcctccttctatgatgctcccgtcttttggtgaagaaagaactagatgacaatatgaaattggagaggacaaataaacaagttgcaataagcctatttggccttattatcagccaggtgctgttctgagcacgtgtacatatcaactaatttaagtcttatgactctgttaagtgtttccgttgttctcatcacatcacagagaggaaacccaggggttaggatttgaacacaagcagctggccttagagtccagctcctaacctctacaccacgctacctttcctattgatgagtttcttatcatttaaatttatatgtaaaaatagtgggcttataaatgcaacttcacatgacaaaacgattcataaatttaaaaatagcctaggacttggattacatttacactgcaatttatagaaatagcacagattcccaggcagcatatgaccaatgaaggttgctgcaggagctgtttttttgggatgagttttccagctacttcagcaagagggtatggatgattcatttgaactgaaagtctatgtgtgtatctatatctatacctatatctatatccataattattgcccccaattctgttgatgcaaatgtacattgccgtgcaccacaaactaaatcaacagtggtaaggcaaaacggtttcgagcatctattgctgtgtaacaaacgaccccaaagcacagtggcttaaaacaatgaccattgtgttattccatttcacaatgaactggattagaaatttcacagtgaactgggttagaaattcaggcaggactgagttgagggattcttctgggtttcatgtggtattgtctggggtccagcagatgctggactagtctagaggacgcaagacgactttgttcacaggctgcttccttggatggttgggaggcagtgctcacggagcccctctctctccgtgagtagtcttgactcctcttcatgtggggtctccagcaaggttctgcaaggcaggagggctccaagatcccaaaaagaagctgtcagttctcttcaagtctaagcctgaagctagcctggtgtcagtcctgccatactgctggttaaaatagtcacaggtcagcacagattcaaagggagcagaaatagtctccacttcttgatgtaggagcgtccaagaccttgtgaacatctttcatttgtcacccaactaatggtaccttatagcacttcattgtttaaaaggcagaagaagccatgactgactcaaggccatcttgaggatgtgttgcccgcaaagcatcctttctgagaatggtggcccttccagcgactggccagtggtcacgcacagtaggggcttttcagtgttgcatggttgctggccttcttgatacaaagctgaattggcgccctccgtaatattcggtataactctaatcttggtttacaaatgccaaattttcatgacccttaataactcacatcagaagttaccagtaacccgtgggtgaaaagggaaacctaattactaggcttttgagttcttggaagattcccctcaccccacctccaagaagcacagcttgagacactggtttgggtgcgggtatgtttttgtggaggtgatgccaagaaggagtgagagagagagggagttggggaagcaggcaaagtgtggtcacaggggtaggggtcaccaggtagctgttgagggcaaccagggctcagctccacagaggtgtgcagaggcctcctagaactgcaggacaggaggcaaacaccatgtaatggctcctacttccctttggtcaaaggatgggaggcctggactctcccatgcttttgggtaaggtgggaatagtgggggtggaggagacggctcccaagatggacaagaatctctagagcagaaagagggccacacctgagccaggatgctgtcagctcagctgagcctgagctctcatggaactgccccccaccactgcagttgaagtctgaggtgggccaaagtccatgacagtgatgcagttgagacatttagagtttctgtcatggtacagaggccattctgccgggggccccttctgacagggttctggatcaagccccgcatcatggaagtcctttgccaatacttgctccgtggtctagtgctgtgtgacctcaatgaagttattcaacaccccaggcctcagtttcctcattcatccagtggtagtaatagtcatccctccccactgggtggctgtgggaattaaatcatgttataaaagctgaatatgggttggtctgtggtgactgccctgatgctggtctcgaacacagtgttaggctccatgaacggcgcagcaatttccaagcaagggcaccagggacggctgcttgggagatgtggcatcaggtcttgactgatgaataggatctgggcaccgtgagaggaagagaaggaatgccatgagcaagggcctccttagtcttactagaaaaatggattgagcacctaatgtgtgccagccctgggccaggtgtggaggattcggtggtgagcatgacagatgtggtccccacctcatgagctcacaggccagcggagaggtggcccacatggggtctgtgtggaaagatgtgggtcatgccgctggcctaagcctgggcatatgaccacaggagggaaggctgacatgtggaggcaggaccccatcgccagtggcattcctgagcagttgtttacacagcacgtggtgccagtggctgcctgccgtgaggtacagctcctgcctgccctcccactcctgagaggtggcctctgacttcacatcactgcttttctgaagcctttcgccactgcctcaggtgraggtgtggctcctccacatcgctggctccagttagggcagtaccctctgtcccctccaccctgacacccacatgctcctgtctgtgctgtgaaacatggaacttctcaagaacagcaatgtgyctggtatatccttggctctgaggctggcagggaaagctttcagtaaatggatttttttaaagttcacgtttaaaatgtttttaaatggtggtaaaatacacataatataacacctaccatcctaaccacttgtcagttcagtagcacgcagtccattcatgatgttgtgctaccatcacgaaagtccatccccagagctctgtccgtcttcccaaattgaaactgcacccattcgacacaactcccattccacccacctagcccctggccgctgccgtgctcctcctggtctatgaatgtgactgctccaggttcctcagatgagtggaatcattcacatttcatccttttgtgactggcagtgattggcttttaagcagtaaagggttgcatgtgtggcccagatcacatgggtcataaaaacccaggcccagaaaagcccttccttttccgtaaaggccacctgaaggccacctcagcatcatcgcctctctcggctcctcccagactgtggggatttctccatccattgagcacacgagcgccctgtcgcagcctctccctgggcaccttggttggctctaggaggcatgaaagtcatccaccctgcatcccacagcaggctggggactctcagaggacagggcccatgcctgacccaccctttaccctcagtgccttggagctcaggcctgacacctggggttctcagtcactgtgggtcgatcgtgctgcaaggcaagcacaaacatgagccaagtcagagtgaggcctcatctgtcgccagtctccaaagctactctgtgctgcacctcactgtgaggctggacttctcctccccccaccgcccctgttcttccctttctggctgcagcctctttgcacagtgccaagctccctgcagagagagccctggtgtcacagctccaagggtacagggggtggatccatgggtaactgtccatgccagcgacccctgctatagtccagctgcttgaagctgtgagattgctgtggggctctgaggggtgggggtcagtctgggtaaccagggaagcggaatctgctcagatgtttggctgtccaggagtcccagagctggctttttccagggctctgagacccacagctttacatcaattgttccctctcaatctagactttgctcacctctgaatgtagcttatctctgtgcagaactgaccccggggctgtggcaacatctcccttgactcattattctgctaggctctagtacattatttactagcatgaggcatattccgtcagggccagttgaatgcctgcatgaatgcttcttgttcacagcatggtatgatcaggcggcacccaacacaacatgtacaatgatcaagcaggtcagtgaccctgtgcagctctcgagcatgtggtaggtggggtgtggagggtgcctggcctgcctgaaggcctccagctgaaaacaggagcaaatgacaaaacatcagtatccactaagagtgctggtgtttgacacttactatctcatttcagttcccttagaagcctgggaagtaggaatgttattcttattttatggttgaaaaaatggaggtttacaggatcacgtatcttgcacatagtaggaggctcatatgaagccagagttacctcagtgtcccctctgagacataaagatcctacagccatttttcccagtgtcctcctaataactagatcagccctcgatggggtccctctgaggagctgctggatgactggacacaaggctgccctccccgggccatcatccatactcagaaatgccaagaagttgcctccctgagccaccttatctaacctcactgtccttccccgtgggccaccttatctaacctcattttcttttccckgcagcccctgcactggccgggagcagctgaagagtgcctgtgtgatccagaagccaatgacctgggactctctctctggaccacctgttcagagcatgcatgcaggtatgggccaggccacgaccaggtcttgggtggaggaacccctacgcaggaagcttgctttgagtcttttaccaccacttatttttgcttyccacacaatgtttgtaaccttcttgttttttgaattgttttctttttaaactacttgtgattgggaagaggcgtttagctttggctgggtatgaggatctgaaatgtgtcagctctggcgaagacaatcccagcactcttgtccagaaggaagaatacctgctatggagggtgtgttcagaaaaaggcaccattcactgtagatatgcttctttatgcaggccagaacatcacctcccagtattcaccagaaaacatacayagagtagatggcagtcccttcagccatgcatcctcctggccagttccctgttgaatgtgaggacaaagagatccgacacttggaaaaatatctctactcagtgagcattaagcctgagggttggatcagtgtattagtgcgttttcacgctgctgataaagacatacccaagactgggaagaaaaagaggtttaattggacttacagttccacatggctggggaggcctcagaatcayggtgggaggtgaaaggcacttcttacatgatggcagcaagagaaaaatgaggaagaaacaaaagcggaaaccccggataaacccatcagatctcrtgagacttattcactatcacgagaatagcatgggaaagaccagcccccgtgattcagttacttccccctgggtccctcccacagcatgcaggaattctgggagatacaattcaagttgagatttgggtggggacacagccaaaccatatcaatcaggaaaactgccaggcaactctttacaagtaacttgtctgccaatttctgccaaggtccctgggggagggagagacatggaaggactgaagtggtgggtcaccatttggggattttcccaagtacactgtggcacacactgaagtgccccactccaggactccagctctccaggaacagcttcagggctctgcctggggctcctccatgatccaagccaggggaagaccacaggtcacacaggctgggctgctggcaccttgtcacccctggttatttgaggcctgggatgggaaggctttactgtctcacctctgttttagcttttgtttttgttttgactctcagcaattattaatacatctctgctcatcctctgtcttgtcccaaaaccaatgcggaaaaaaatagctacagtaagtcatacagaaaacaagcaccatagcccatcctgttcttgcctctgctctttaagctggaacttgagcaacactgagtgacactccagagaggctcatgtgagtgtgtgttcaggtgtccattcccagcactgctgggagattaaataygagctacttttgttttcaggattgtgtgcgtgtgaatgtgtgtgcgcgcatgtgtgtgaaatgctgtttactccttttgtattagctcccaaataatttgggggaaaagcacaatgtggtgctctgattctacctctaggctcaaagaataataggaggaagagctttatagctgaaccgggccgagaaattgtacgtgtgacactgaaacgtgacccacatcgtggttttggtaagagggctccctgtaggtgaggcccagtctctactgctgggcaaagtggggaggtgggtactgttttccctttcaacttgcctactcccctttcctatccctcctctcccagtctgccttttctggtaatcacttctgttttttttctccctttaattgttcctaaagagcaatgggacttttgtttccaagtttttctttttggggtgcatctaagtacaatgcagaaaaagattttttcccctaataccatgtaacaacattcctctagtcagctatggggaagaagagtcaatttatctcacctcttactagtgaccactttctaagacccgaaaaactgtagaagaaacaaggtacggagacaaggtacttgattaaaaatcatttctttcctatgtctcattatctactggagcaaaatccagtgcatattggtggtttgtattcctagctttagctgtgcttactaatggggaacaatccacctttctccaagtatcatggtaaagtagaaaagatcctctatttgaggatcagaagacctgactgtaactatcagctaatgccacttggtagctgtgtgatatsagggaaataacctaacctctctgaacagcaaaatcactaagtatcatcttatcatggactatcatcttggattacagggtttgtcattaatgagggagagtattcaggccaagctgaccctggcatttttatatcttctattatacctggaggaccagcagaaaaagcaaaaaygatcaaaccaggtacatctttttaaattactagagatgytgttttaagaaaccactcttttttatttccttgaaggattattgagatgttttatttttctaggagggcagatactagccctgaatcacatcagtctggagggcttcacattcaacatggctgttaggatgatccagaattcccctgacaacatagaattaattatttctcartcaaaaggtatgttttaacccactcttgggagcttaagagsctcccctgttttcaggagtacatgattactgtgaggtactagaccttgaagtccacgtaggtcttctatattgctttcctcatggtgttggcttgcaaagaagcagtgtagtggcacaaattaataagctttgcaatttcaggggcagaatgggcrttaccatgcttgtcttgctgaaagggagtaacctactctaattttgttagacacggctggatacaaccagtctttttttttctgtcaactctccttgcatggcagggaggacctttttattgccacccaaagtccttgttgatagggtcggctccaggatttctatattttgtatagaatcctatacaaaatttctatattttgtataggtatagcaatcagctggggaggagacaagcactgttctttgttaatcttttgttttgggtttagggctacatgtgtaggtttgttattacaggcaaactcgtrtcacaggggttgctatacagaccatttcatcacctaggtgctcagcatagtgcccaatagttatttttcctgatcctctctctcctcccatcctcctccctcaagtaggctctggtgtgtgttgttcccctctttgtgatcatgggttctcattatttagctcccacttgtaaatgagaacatgcggtatttgattttcctttttttttttttttttttttgagatggagtctcactctttcacccaggatggagtgcaatggcacgatcttggctttctgcaggctccacctcctgggttcaagcaattctcctgcctcagcctcctgagtagctgggattacaggcacgcgctgccacacccggctaatttttgtattttttagtagagacggggtttcaatatgttggccaggctggtctggaactcctgaactcaagtgatctgcccgcctcagcctcccaaagtgctgggattacaggcatgagccactgcacctggccttttcttaaagctgaattttcgtggcaagctcgctcttcttacttgatgtgcatgttcctgatcaacctaaagagtaaagtactttttgatgatgcttttcttcatcctttagataagaatgagagagcaacaactgcctatattaaaggaaaatactattgtttttatcgggaccaagcttgaggagcctggaggaagtaatgggagtaggctaacatcccttctccctagtttcctgagaccaatgctgctttttggttgggtgatcctgtaaactaacagcagaccgcctgcaaattcaggctcatgattgcttcttcacacttgaggggtgttgtacagttttcccttgtatacaggagaacttcctgtcacaccagccagcattttctaggtactaaatgcaggcactgcatttgccttgccttctgaacacttctgcatgcatgctctctcactcttgtacctgtacacagtgccatgcagctccccygtccagaagctatgggtggtggaaggtggccatgctggggtctcagccccacacccttcatcctggggttgaagccttctcagggactggcctcagtacatctccaatgccagtctctggcttgctgtctgttggatttcccagcaccactgctctcctttctgcagtggttcagcaatccctgtgttttcttccacatcctccactgacaggagcagtcaaaccatcccatgtgttgtcaggaaacacaatgcaggtgaccaaatcacaattcagcatagtccaaggatggcctgctgtgatggaggttgtcaaaaagcagtactcgaggtctgctattctcaaaccacaacctcacattwgaattccagacaatgagtttcccacaatggctgggaataaaatgtcctttcactgtggcaccccagccaccttttggcaatgctgccttcatcatggtggggtttcctcatagctgggccactgccagaggaagatgtttccttggtgatgctggctgggtctccgtggcagagacttgactaccatgactttcttctatctctttaggctgctgttaaggcagctgggctagattggagatcaggatcagacagataaaatgtccatcatgagcatctgtcatggtctacaataaattgagtttcmtttaccaaaaaaggtctcccagctcatatgtctactaggcaggacaccagttgcagcatggtttgacttttcatttcaatcgtaagtcccatcctcacctctcatggaggatgtggaagagaatgagccgatgcttatgayactgccagaaggacaatgatgacagaatctgtgaatgaaagggccagaaatacagcattatgaaacagtggccctgccactccctgctggatacctttagatttgaataacttcaaatcaaattcattaaatcagatttatttaaattgaattcattcagcatgtgagtttgggcacttccctgagtgttaatgagtctgtatcaaaagtagtaaatctacttgtatccaggtctaaagaaaatctaactgttattcattcctcccacatatatttgtggagcagctaataataacatgttaacagtagatacatttattgaggctctaccatgtactaagctgtgcgtgtctgtgtgtgtgtgtgtgtgtgtgtgtgtatgagagccatatatatatatatatatatgagggaatatatattctttcatatatacatatrtatttttatctttcttaacatatgtaaaatcttttctgtacgtataatctctaagcctcaccaactctacaatattattgatattgatattatctctactttagatacaggaaaatttaggttcagttatgttaagcaccttgcccaaggtttttctactgattcacaacctcacgttcttttctttgttctatgccaggtcacgagtcagacacagggtgagcaggaatcagtggcctagctttcactcacaggggcctgcagtttggttattaccaagcctcccaaaaggacctgatacrttggtttttggatcacatggtggctgcagatgtgctcagtggggtgtccaggagaggctgggtttaagacagttcccacatgctggctgtagcatttggggcaggacacttaatagctttgactctgttttctcatgtttgaactgggattacaccttcctggtgggtttgctgagaagatgggaagatgtccatatcttcctatatgtatatctaaggtgcccatcacatggctagagcttaataagggatagctggccttatgaacttcttttgagcctacgcattcatagttgggtcacgtaagctctatctaggtttctaaatcccatgtagaatcttccctttctctaatctaaatgtaacatctttcargaggagctaaattcatattgtacccgagcagctataaacgatcactctgtcactggaggaaaacgctgtgcccacatagagatgccaccaagaaaccrgcctttttaagctgttgactttttcttggcttgtttttataggtgttggtggaaataacccagatgaagaaaagaatrgcacagccaattctggggtctcctctacagacatcctgagcttcgggtaccagggaagtttgttgtcacacacacaagaccaggacagaaatactgaagaactagacatggctgrggtgcagagcttagtgcccaggctgagacatcagctttcctttctgccgttaaaggtaatcatcccttggtttactttctagatctggatgaaagagaacagactgtgaagcccaacagcctggcccctaggcccttcctgttctctgttttccatgtcaggtggatggaagttacttagcccstttgagccacagcttcctcatttgcatacagaagcaaatgcctgcatggcatggttgttgagaaaaacgcatagaagaaggcagagttctaggacagtgtctgggcacaggctcagtgtgggtgcctctggagtctttagtcactaattataattgttgtgataatagcaccatgaggaaattgattgctgccaatggcaaggcgtgggcaaycaggcacctcctattcttgtccttgaattggtcctcaagctgggaactcagtggctttgctcttgaccataccccatggaggaagaagatgggatctggagtaggtgtatggagggctgtgtgcttcagtcccagctctgctgtcctctgccgtctctttggaytcccagtggtgttgtcttctcaggccccgccagacccatgccccagcctctccattctgctctgggccctgcacagctggtgctcatggactgagtcaccttgctgtgttctgcttggttctgcccagtcraagcctcagcaggagcccgcagttgtgggatgagtgaggacagggtggcagtgctggagtctcagttgcacacccttcattccactctytccctgtgctgacacaggttgcctgtgcccctctacaaagagcacagctcctatsagggtccatcgaccactcccttctctcgcccttcaggctcaggggtggtcacagcacccagtgtttcyagccccaggtgctgaactgatattactggtttctccaaaggctggcaagacctttgaaaacaggtctcccaygacctatcctcccttactcaggctgagtgtatgcccttctcattcttgctgggacaacttgctggttgaaacaggcaggttattgcacctctttcaacctygtttctctttttatgatggagataatgatgtctgtccacagccgtggaaactaaggtactatgcccagtgtcggggataaaacccgtatctttcttctactcatcttagcttcatcagctgggacccctgtaactaaagacagattaatgagagaaaagcatccacgtgtatttactataagttttatgtgacatgtgagccttcttayggaaatgacctgaagaaacagttctccctgagtatatttgatgaagaatggagagtcatggagaaatgagataagacaaaaagcaggagtatgtaaggtgggaggaactcagcarggcctgcttgttcagattcctctctcagtccctgtgtcttcccacataagatgctccatttttccagatatagggagggcattctcacttgagggtcttgtgccctgcttcgggggaagattagaaaatccttcctaggttttagggcctgcttcagaagagaagggcaggggaaggtcagagaaaccttccctcatgtgctgtttctccaattcctccaatgtgccaaggtgccctattttggggtagtgtgtcttgacctctgtcacaaggatctggcatgcaatagggctccatgaatgacagtgccttcctaattggccatggtgctcacctggacagaacatcccatgaggaactggatrcaggaggccagtggaagaacaacgatagtagctgccattaattgagtrcttacctgtgtgccaggcagtgtcctgagcactttatatgtattagctcatggaagctccatggtaacccaatgagatcattcctattatcaaccccttttatgggtggggtayctgagacagaaagagcaaaggagcacacccaagctctctcagggagcaggggacagagctgggattcrgattggcctccagagcagaaaccttcaccccaggccttcctctggtaggtcctctctggcaggaagcagagcagagaggccttcaygctggggcttctttggtggcaaacctgagagttggtttcctggggctgggggccgttgaggggagcaagggagctctaaggccacgttgaccatggtgcaggctgtaggacscaacccagatgctgcaggctcttctgggtctcttggccaactttgtggccagatgatcctctgtggtatggtggactttagattctcacttcaggtctcaacctcagcagttgaggcttcgttgttcagcttcctccagcttgtytattttcctgcgtgtcgttagaattttctaacattcatggtgattagaaagcactaagtaaagggggcagayaggacaaaagaccccatcttctaggcagagggacagcrgaacatgaacagtgacccaagcattctctgcctagaagtggcatcagcccagcccatcactccctcatcttcctcctgctttgtctgaggtcacatgcagaaggcctgataaagctggaaatgaatcccctgctggcccartccaaarctcatgatctttctgaggtgcaatgctgcctgctcctgagagcagtatgagcyaagaggtgacatcttccttcatcccatctttatttttgtttgtttgtttatggcagggtgctggttcttcttgtcctccatcacctccagaaatcagtgytggtgaaatctactttgtggaactggttaaagaagatgggacacttggattcagygtaactgtaagagtttttaggagagcttgaaaagcagttaacaagatgtccgtstagaacctggtggccattccacccagatggcaacctctgacagtgtgcttagtttgcacaaatgtaaggggtaaataaaaaagcmartgggggcctgcactgggggatgagttcagagacaaacagaggtactggggaacctcaggatgagcagggcatgcactaggggactccaaactcatgaggaggcagtgtgggcagagttggctgatgtgtcctgactctgaggtcaagctggactgcagagagagagaagcacattggggcttcagggacacaagctaaaggtaagaagggcagtccactgtcatctggccaaggatgggtggggcagtccactgtcatccagcatagaatcagtgtggagcctctkgctcagacatcccagggccaggcctccatcaggactgacactttccatttggtttctgagctctgcctggtagacccttgtgaaaggagattacccatataactgtgtttacccaaggggttggggaatggcacacacaaarctggtgaaaatccagaggtcagaggttggaaggtgctgcttttattactgagtattgaaagtgatccattacaggctgggctcggtggctcatgactgtaatcccagaactttgggaggccgaggcgggtggatcgcaaggtcaggagattgagactatcctggctaacatggtgaaaccccatctctactaaaaaataaaaaaaaaaattagctggatgtgatagcgggcacctgtagtcccagctactcgggaggctgaggcaggagaatggcgtgaacctgggaggkggagtttgcagtgagccgagatcacaacactgcactccagcctgggcgacagagtgagactcygtctcaaaaaaaaaaaaaaaaaagtgatccattaccttcagaccctggaatgggtctggatttcaggaatgtcattgttggatttaactgttgatgggaaatagaatgrcatctcccaccaaagtaaggacactctatggctgatgaaaattttcagaggaaattcaagagatatgtgaatggagggcattctttgctttcccctgtgataatgctatgtacctagagcaagratatgtgttttcttggaccctaagcctgcaatgaatttgtcatcagtagatgattttaagggaccaagtaagaaaccaagcaataaggctcatgaatccacatggagtgaacaggctgataccaaatatggtccatttattcttggcttggggtaacagccttatcagacaccaaacatagctatttttcatctgaaaaactgactaaattttgggttattcacaaatatatatttgctgagaagagkttgatgatttcctttggctggcaaaaacttggattttctttgcagatatttaatttcaaaaataattcttgaaatgtctcactcaaatccaaatggccattaaacacatgaaaaacactcaaacccgtgaaaagccacaggaatacaaattaaattaaaataaaattttaaactttatgtctaccagcttggccaaatayagctggtggaaygtagaaaaatggtactgtcatacaaagctggtagaaatgtgaataagtatatccatattcacatagggatgcaatctggcaacatstattataatgaaaaatgcacatatcctttggcccatcaaagcacacaagacgtgccaggcacaagccttcaggcccayagccatatccacctacgctggtcactacctatatagagatagtggtgcatcccacgtgagcagttgctgagcaccygccttgtaccagtgcttgggctggggacatgcccagatctctcacatagttgctattgttaagcttatgaacacctaatcttattgctcagtggagaatacaatctaaacraacaggtgaatacagaagacagtgccagtcggaggtaaggtcatgggatagagtggtgggcaggtggggattcccttagctggggaggttggggaggcttcctggaggaggaaagatgggtggtgagytytttgttgtgtttttcagggtggcattaacaccagtgtgccatatggtggtatctatgtgaaatccattgttcctggargaccagctgccaaggaagggcagatcctacagggtgagagatggggatgggtcctcattgggaactctgtgctccatggtgtaaagagccctgcactgggaggggcagcctctaggccttgccctgctcccattctgaaaactcatgcaaatgattgcctccccaggtcatacttttctcacctggaaaggaggtgatagaayctgccctgcccatttgataggttggggggtctgcagtggcacactgggaagcataggtgatagaaaaatagtagaagacttaaaagacttgtgttgctctttggcctccatgggaaaacatactgcttcccttggaggacaagtgggcctcggtaaactcactcgcacatccggggaggacacctgagccttctgtttgcccttgctcagctcccacttctctgatggaagggggtgatttttaytggtctccaaaactgccagaattgagccaaaaggggaacctaggatcttacttatctccatttcccctagaattctggtgtccccagcgtcaaccatgcctccctgacctttttttgaaataaaaaaaatacatsctggagatataaatatctaagtgacttgaaaatacttycaaaaayggtttcacaggaaaacaggaggaaggataaggttgaacagagctggctcaaccattctgtgagccaataatagaaaggcttttatatccctgatctgtgatgtgcctgagaagaagggagtgagactgctcagagaggcaggattcctgctgactccagggggacacctggcacctcagcttcctttcccacttctccaggctgcatggaggggtgccgggcagggkcctcctggaagggaacctcctgcagcctcaagcaccaggtcatgacatgacatctatccctttcccaggtgaccgactcctgcaggtggatggagtgattctgtgcggcctcacccacaagcaggctgtgcagtgcctgamgggtcctgggcaggtgagtggactgttgctgaccagcttcccctccttccggaactttcctgaacaacatcagaagctgaaatcgcctctgggtgggagggaggcaggcargaaacaagactttttctttgttagttttttttttctcttccatttcttcttaccctcacttttctatggggatgtgaaacccaggagatagcagatagatgtttctgagtaaaaaaaatctcaccccccatagatagccttagaaacttactggtggcttgcctgaattctggaatcagacagcggaatggagaagatggagtgaagagactgctctagcctggctctggctgccccagccccgctggccctgtgwccatgggccttcttacctccctacgtttgcatrggatgaccccactccrttccctgttcatgccattccccctcaccctgtgttgtacccaccrgggcgtgggtcagagtgtcctgggattcttttcctcacaatgaggtaggaattcagggtgccaaragcagagccattcatcctttatgtcccctttattccctgccccgcagtgactcgatgttatcccactgtgccgagtcctctgcctgaggttaggagcctctaactgcctctgtgtcctgagccacagagctggcatcaccctcttttggcaactaaaaagtcaacagagacaggagggattcctgaaggcccttccagcaagcttggggcaatgttctggccacttttcgctttctttcccaaagcgkttttctggtgtctggtgaaatttgcttatattagtgactttggttgacctatcttgagaacagagccataatttattggcaccttctgatatttagacctttgctaatgagcatgggtagagagggtacttggctggcctcctggcagcttaagcaggtaggaattgtccctctgggatcctgggccaggtgctgagtgacaggtgcaacaggaagatgaaggcagggccacatgccctgaatgggagcttggcatttctgagaagcttccaggtgatgtctatctgctggttcttgaatcacacttagggcgacaagggtatatggtgttgtggggagaaatgtgggaaatcacattggaaagaaaggggagggcaggtggtacagacctggggtgccatgggtttgggtcttaggtgatgggaagcattggagacttyaaatcaagaatgttgcatgttcagtttttgtcttagaccaattcactggcagccatgatggggtggaccaagaaggktgcagacagggtccagygagccaaggtaaccagagcttgccacggcccagcgggtcactggcagtgagagaggaggtggaggggagggggcactgaggagctgttcttgatggggaatgttcacatcttagaaaccagatgggggagagctggaccactccaaatgtggcccttggcaggttaatggtggggtgagccaatgcgaggggaggagtgttttaggaagaaygaggaggggaagtgagggtgagtgaggggaggaagatgagtgtggcactgcatgtgtgaagtggasgtacatgtgttgctttcaggtgcacttgtctaataagcactgagaaatctgggtctagatcccaatatataggctagttgagagattcaaatgagtctgcttataggaaggattcgaaaattaagaagcatttgcagagtcaagggagtgcctcctggttgccatatgaagtgtaaactgagtttgttcacctttccttctaggttgcaagactggtcttagagagaagagtccccaggagtacacagcagtgtccttctgctaatgacagcatgggagatgaacgcacggctgtttccttggtaacagccttgcctggcaggccttcgagctgtgtctcrgtgacagatggtgagaggggagagaattgagtgttactattgtcatgttattgtgtgccgcttttgaattgtcaagtcaaaagggaaaggcaggaaggcttcctctgggtcctgaaaagaaagcgagccatrgtgatcatgctgagatckgctttttcatgccatggaagcccatctcatggaataggtttctggaaacaaatgcattttccccaaatkatttctaggcatctttctgcccccagccttcctcagtcctttgatcagctgccagaatgttaatgtttgtgtgaatatttaggatgaaattgactgaaagggtcatacactttcagatacatttggcttcacagtccagccaagtcatttgtaacaaagttatttgaggaatgactaggcaggttgggagagaaggttcaggaatctagccttgttattagcatcattttaaaaggcaaaygaamgatcrtttagagggacaaaactgcacgttttccgatgggctgcccmtctgcaattcccttgtgattttggtatttgccaggaacacgctgatttcctcagtaagaacgatttggaccttagccatgttttagtcccttcatagagattttctgattttgctgcagaagactcaagccagccatagggtaggggtggggcaaaggggcatgcttctgtttaaatcaagtctcctctgtcctcacccctttgctcactcccttggggcctttgagaaatggactccaaagagtggaggaggccttagggcgatggtagaactggtcgtgtgacacaccttcacataattgcttcacataattgcttcacatgcttccattcttgccctggtgaagtttgcaagctgtgctctgtccctctgtgcattgatgccagcggggcagcccagaggcctctttggtggacagaccatgtaggttgccagctctgttcatccttggtgcccagaggcaactgttttgtcttatggtcagcctacatgggtwaacaaaatggcagctaaagcattgtccatagaattggccataattttctccatggtctaattatkcaaaatttagtttcaagtatactacaaatgactagagttctaaaggagtaataggaatgtatgtgatacaagttttattaaatgccaagagcatgttgtgtatgcctagcagctatatctttatgtataaacatagttgagttatctataattgtgctattcaatatggtagccacttgccacatgtggttattgaggacttgaaatgtgaccaatctaaatggataaaatatgtattggattttgaaagcttagttcgtaagaagaataaaaaatatctcgttaataattttttcatattgatgacatgttgaagtggtaatattttagatatatgggattaaattagatgtacgattatagcgtatttaacctgtttccttttactttttaaattgttttatttattttttgtttgctttttccttttattttaatgtagctatttgaaaacttcaaaatgacatttgtggtttgtatttatagctcacattatattttattggacagcactaatctataacatacataatgtactctgtcataaaattagcaaaggaattatttgaacgtaaaagaaataattcatctacttgacaatytgcattttgagactggtcaatttcacttgtaatctactgaagaatttatttttatcaacatcccacactacaggtcctaagtttgaagtcaaactaaaaaagaatgccaatggtttgggattcagtttcgtgcagatggagaaagagagctgcagccatctcaaaagtgatcttgtgaggattaagaggckctttccggggcagccagctgaggagaatggggccattgcagctggtgacattatcctggccgtgaatggaaggtccacggaaggcctcatcttccaggtgccgggggtcatgggcaatgcrgctctctgtgcaggctggccccagctttgcctcttactagcctgctgccrtggkgaaractctgggctctcaaaaatcayaccagcagcccggattttaatcacacaaagagagtaattagtggtacatgctcacatttaatttaaaatctctgtttttaaatatctgaccttgagtcagccttgcttctcactgggttcatgagagaagctgaagataaagccctggcctttgtgctggctgacgtctcttcacacacatcctgggaggtgggcrtggggctgaagggactagagtgggtccctttctgctctccttcccatttctcaacacatttacagcttttcatacattattacactgattgtcctgtctatgataaaaaatgcaatttaagaagagagagtaatgaaatactgtatatattagacagagtcctggaagaaaatggagtcatttgaggaacatttaataaaggtgtgggcaggttgttaggaagctcaagggagcatgttgtggcctagggctaggaggaagagtgggatgcagttacccctatcctgaggccaaaggggaagggaaagagcagttattccaccccaggaatggagagctgttggaggggactcgctggcatgagctctcacyttggctgaggttgtagtcgtcccatggcaacctgaagggaggaatttggaaggagcaatgacctccgctcctccctgtctctggtctcttgccgtgttcccctagctgagcccaacaggaagcctcatgcagcctttataagtcagctccagaaacacaaagcaagatggacaaagggggacagtggctctgggcagggctggggggaggtctctagaacaccatatgcttgggtgggagggcatgccttcatccatccatctcctgatccaagaacccttctctgagaaccactgctgggctggcaactctatgagagactgaagacacagaggaagacagctcatgcagtttcagagctcatggacagaaaacagcggtgatggcaggagatatgtatcctgagagatgaaagcccatgctgcagtgctcacaccagtgagccaggaaagaagtgcaccccttggaagtcctgygtggctgaagcagggactggggagtgtcttgatcagcagttcttaagcagagattatttccttctcatgggatatttgattaagtccagagacatttgtgattgtcacaactgatgagtgcttctggcatctagtgagtagagatcagagatgctgctaaacamcctacaatgcacaggacaggcattcgcataaggaattgtccagcctgagaggtcaacagtgccaagagtttgagaaatcctggtctaaataggaaataggagctatcgaggcaaccttgaaccctggacattgagagggtggcttggagcaacagattcagcatggcaggggcttaggacgtgggtgcagaggggagtagatgggagagagggaactgtggtgagaggcagaggcaggcagaaacggggtctatgtgctatgccttggagcttacattgagggaaaagtgagtcagccagggtgtgcagtgggggaaggactcagttatatctgcactgtggaaaactacccttgagcattgcagagggaggcaggtgggtgacactggagaaggcagcaagcagtgaggaggtcactgcaatactacaggtgagaggttcccagagcccaagccgagccctgataggaagctcagagccaagggtcaggctttagagattcagatggtggaggctgcaaaattgstggcccaagatgagggcaggttgggaggaaagggcaattgagatgaacagctatttgttggagtcattctttctctctctgaagaaaaggcattggtattggcagatattgccattcccttgagcaatgtggaaggaggcaggtgggtgacactggtgaaggcagggagcggagaggaggttactgcaatattacagatgagaggttcccagaacccaagctrcacaaaggtgatgcacagcccagcatcttgcatcaactttgtggaagctgcaggccactgaccttggttccttgcactttgaaaagtcaggcccacagcagggttctccggagttctctggagtgagaaatagatcaaggtgcagggaggaggagctagtgcctgggacgcagtggggagaacatcactgcatccccagcaatgcaagcccaaatctaacagtgaatcttggtttytcgcaggaggtgctgcatttactgagaggggccccacaggaagtcacgctcctcctttgccgaccccctccaggtgcgctgcctgagmtggagcaggaatggcaggtaggctgcagtgtcttctactctctctacctggctctggttgggccccccttttccagactctagggtcctaagagggttgtagataggttcagtgccacctcctttcacaggggtaggaaaatagctggcccccaaacctcagtaggtctccttcctctccctgattctgcctcttctgacatttgggtcttcttgtagatgtttacatgtttagactttggctgtgaaacttttagggccaggctctctggaagctcaggcatcagagagggaagcctgggaagaaggagagtagacacagaagcagaccaagggaatttccaataagaatttccattctgagagatgatgtggaaaataggatatatgattaccctcctaaagcatgaaataggcacgtgcagtctggttcaaagaagagagccattggaatcaggaaaatagggatttttaccttgacacatatattagtcaggttctcagagaaatagaacagatagaatgagtgtgtgtgtgtgtgtgtttatgtgtgtgtttatatatgaagagagtgagagaaagagatttattataggaattggttcatgtgattttgagggctggccagtccaattctacaggggaggccagcaggctggagacccagagaataattgatggagatcaagcccaaaggtggtctggaggcagaactccctcctcctcagagaggtcagtctttcctcttaagggcttcagctgacagcatgaggcccactacattatggaagacaatctgttttactcaaagtttgctgatttaaatgtcaaatcacatctaaaaaaaaataccttcacagtgacatctagatggtatgtgaccgcctatctgtgtaccatggcctagccaagttgacagatacaattacccattgccatgccttctgtggggttcctaggaaacagattttgcagcagagatgtgagcgtgggaggttttatggggcctgcgcttgagaacatcccctgtgagggtgactgaggtggggtggggcagaaggagagatcaatgtgcagctataaacagggcctcagctgattctggagggagccctggagcagagatggccccttggagctgccatgaattgggacaagagaacctgtgcctttgcttgttgccctaaccagcgctggggtgtgggctgccccaggggaggggagatgaggcagtaggatgcgaatctcagtcctggagggggatctgggcgggtacctggatcacctgtacctgctgtgctgcatgggccttgggcagttgcctgtcctctctaggccccatgattcctcatctctaggatgtggataaaagtgatcacttattgtgcctgagggtgacaccatcactaggacaacataaaggacttgatgtcccagatcctgttgatgcttagactccaagaggtcatttgacatagcctctagggagggaagagctatgggaaagatatccaaaagttgctgggttggaaaagaaggtagacagcagcaattgtgttaagaaaccgaaccaggtgagagagggccaaatttcacacacacaaattcaggccaaggtgctgggaccctgtgtttttgttgaaatatctaggaaatcccagggaaaaaagtggtacttccatcctggagaatagctcctcccaggagagcccataaagatctagcaggaagggtccaggtgaggtgtgggggtgagctttccctcctcatacccgaaggccaagtgggaggattgtgatttgcttgggtggctccagtggtcagattgcagaacaagggtcagcagctctggggagcaagcatttagtccataaagtaaagcacctctgagaaggaggcagccatgcccacatttggggtaagggcattccaggcagaaggaacagcatgaacaaaggccctgagatgggaacccacttggatgtttgagggacaaaaatacaagtgtgcttgggccatcgttaatgaagcagaagtggaggaagttgtggaggtggcagggaccctggagggccttggggatcagaggagcatgatgccaccatcctgcatgcagtgggaagccactgggctggcatggagggttaagcaggaaatgccctcctccgttcttcagaggggccactcgggttactggtgcacagggactaaaggaggtcaagcagcagtcattcaggtcaaacatgatgtggcttggactcaggctgtagctgaagtgttaagaagcagccagatttgggatacatctgggaggcggagttcaggagactactttgggattagaaacaggcatgaggaaagagagcaatcaagctttggcatgaggaagccttggggaaatggtggtaccaccaatgcagggtgaaggaggggtaagaaggtaaaaagcctgattttcctgattccaatacctctcttctttgcactagatcacatatacctatttcatgctttaggagggtaatcatagatcctattttccacttcatctctcttggtaccagttcccaagagagggactgcttacaggggctggggaaggccatctggggtgcatggaagagaaacaatagttcttggtatcatttaaaactgagatgtttataggctatccagtgaagagtctattaggcagttgtggagaataggcatgagatcagggctgggaaaagtgaatttgggagttgtcagcatatatagaggtcgtgtaaagccatgaaatggttgagatcaccttgggaaagagtgcagataagttcaaggagaggactgagaagtcagcacagagcataacaacattgagaggcctggtacagagatgggacaacatatgagattaagatggggcctgggaattggtggaaaaaccaagcaagggtggggctcatggtcaactccatgtaagtagggctaatgagcaaggaagctctcaggaaggagggagggacacactttgttgaacgttgctgagagagagagtgaaaggacaaaatattgttcttcagctttagaaagatagaggtcgctggggaccctgatgtgggctccttcccttgggtggtaaggacagaaggctggtgctagtgggtgcaagaaagaaggagggaggcgtggaaacggtgagaagagacactcatctaagaggctgccatgaagtagagcacagaaatgggtggcgagaggtggaagctgaagttggggtaggggcacaggctgctcagtggaatttgctgtgggaagatgaagagttctcatctgaacgtgtccattctcactgtgaggtcacaggcaagttcagggtggagttgttagaaacttgaagagagagacaagatgagaaataatttagagagcagaggtagaaaactgaatggattaaggacacagagaaagattatgtggaagtcttgactgcccatttgacatctgcagtcacacacttgaagctaatctagtcagaggctcagaagcaggggtgaggttcacacagtttgagtaggaattaaaatggaaactcagaatctgcaagtgacacgtgatggaggaagagaggggcaaggaggtgggagctcagggtcttccttgtctgtaagtgagcatctaggggcagagccatggaatctaagcagaataagaggcacaccgaggacatgtgtgacagggaaggggagtgggggtaatgatgaaaagcagcagctccacagactggaggtcttggagtggggaaggattgctggagagcatgtccagggataatgagctagaaggagaggataggttagaaaacagattttggaggtctctccaaagagtatgaaaatgtgacaaaatatggtcttcttaaaattttgatttttggtgtatcctttataatgtccagtctatcagaagagtagtaaatgtttatgatttataattaaataaatgtgcacatttggaggtgtatccctctcattgttagggatgtacaatcagaaatgtggggagaccactcattggggtggttcttcttttgtaggtgagggcaggggtgggaacccaggcatgggctctattacatcaggtatggagatcatggggtggaagtgctggaagataattttcaggaaaaggtaaaatcatgattcctacagatataaaaatgaacacgttaaagattttatttaactcattcagtgagggaaccaggcagatgttaaaactggctcaaaagagatttcaaaggacctgtttatttatagagttgtaaaatagctcaaagacagtggagacagccagaatcagagaacccagcaagttctgctgtagataaaaacagttttctactgaaacacagattgtttttctgtagaaggtcaagcagtggcagcaagacatagcacatcatcaaaaccagaacctaaaaggctgacagggaggtgagcagttgagacgaagcaagtcatgtctgggaaagtgaggaggagacccaggaaagaacatcaccttgatgggggtggagacagggagacaagccctgagatgacagatgaagatgaaaaacttaaaaagaaacatttcttatcggaaagtggaatagagttcattgttttgcatat

SEQ ID NO: 93666 - DNA, 64840 bp, Homo sapiens
ggctttcatgtattgctcagtcaagcaccactaccaatataaacgccctcccatacgacctcgctggagcaatgtttacctctgtccctgcgtccccagagcgcccacaggttcgggtagcccgaaatcttccccaggtgggtgttacatccccaggtgccaagagtgatgggtctgacttttaactggaagtctaaagaagcgagcacccccaccaatgttaacccttgcctgaagtctaaggttaggcgctctccctttccccagggaccaccaagctcaccgcagagcgcagcctccgcggacccgaggaccgccctgcgcgcagtctcgagcagcaaccagggtagcaccattgcgggccggcggccgccgcgctagtgaccacttcctcctactccttctcctcctgctccggcctcctggcgccctgctccaggctctccggcgccctccagccaggcaccggccgaaccgggtagtgccgcaaggtgtaattactgctttgaaactttaaaggcatttggaaagaaactacgggttatgcttactttttttgtttttgattattattttgtaggagacacaaagtttaaaaatagaaagcaaaaagtgtgacacatttaaagagttaaaggaaataaacgtttccaatttaccttataacatgattttcatacactggatttgtttaaaacagactgactacatggataacttttctaggaattgttcttaactctgatagctggctcaactgatgtaggcattaaaataacgtcatattaccatctttcctccacgaattgatgatatttgactatagctttgtcagggttatgtccaactattgtataatatgtgtcagtttcctattgctaccgtaacaaattaccccaaatttactggcttaaaacaacacaagtttactatatacaattctgtagattagaagtctcacttggctaaaatcaaggtgtcagcaagcctgtgtttcttctgagctccagagtagaatttcttgacttgtcttttctgtcttgtagtggttgcctgcattccttggctctcatggcctccttctccatcttcaaagccaacagctttgagcttcaaatccctgattctgactcctgcttctgttatcacatctccttctcttcctctgattctgctgcctctcttttataaggacctttacattcagaccacagagataatccatgataatcttctcatctcaagatacttaatttaatcacatcttcgaagtcccttttgccagttaaggtaacacattcacaagtttcaggtttgtagaacatgaacatctttggggcaggaggtcattattaaaactaccacataaagtttctcattatcttattttttatttattctcaggttggttcccaaacataataaaagctatatttaactgcaaatagatttacagttaaaaattaaaatatttgaccaggtgctgtggttccaacctgtagtcccagttaccagcaggctaaggcaggagagtcacccgaactcaggagtatgaggctatagtgcactgtgatcagcctgagtgactgagtgagaccctatctcaaaaaaaaaattaaaatattcatgtttaaatggcattattaaagtgtatgtccaaggaatcatttcattaagcatttacttttaaattcttcagttatcaataatttaataagctataaaccatttcagatttctagaccaatgacatcatttataattattttccaaataatttggagcttaaccatagtctccgtgtaatttattttgtggattcacttttaactaagatatcactatatactgtagattcatgtagtctctgtggcatcctcattctaaatatacatcataaatcacaggtagtatgaacacaagatagggaaacaatatacttggcctcactgaataatatttaatctgatttctgcttttgcaggagaagtattactaaacaattattcttttagggctcataactaattattatttaaaaaatatttttatgtaggacttttttttctgaggagataaatatgcctttccatatatagcacactgctaaacttagtttatttaagagtccttgcagcaaaaagatcttgtcaaaagaggttcttgatcattgttcctagttatcttgatcattgtgtccaagttattccatcattgttaaggaataatttaagcaagacttaaaattgataaaagagggagaaatagttttcacttttctgagaaagatttactagtgctgagttgatatgaatcattaattctcaaacaactaatttaattttttgttgttactcatgtgttagtgaaaggctattggaaagaagactttttttcttttttttttttcttttcttttcttctttttttttctttttgaggcagattctcactctgttgcccaggctggagtacagtgacaagatctcggctcactgcaacctctggctcccgggttcaagcgattctcctgcctcagcctccccagtagccaccaagcctggctaatttttgtatttttagtagagacgagttttcaccatgttggccaggctggtcttgaactcctgacctcaagtgatccacccgcctcagcctcccaaagtgctgggattacagaagtgagccaccacgcccggcagaaggaagacaatttttaagagacttgggatttttcccttttctttttattttattttatttttgaccaataaagtcatttcacacccatttcttttaaaatcaactttaagtccccatataacagactaataaaatgaaaaattaggaaatgtatggcctttcatgtgattctcttttttttaaagaatttttatcaaaactttaaatgaacatctgttgactcagcatttccacagtgaacaatttactgagaatacttgtgttagtaagcaaagacaagtgtacactaacaagaaactgatgaaaaaataaaaacattcattcacaagagacttaagcaactgctcaaaaaagtgaggctaatatggcccagcacggtggctcacgcctgtaatcccagcactttgggaggccgaggcaggcagatcacctgaggtcaggagttcaagaccagcctggtgaacatggtgaaaccccgtctctactaaaaatacaaaaattagccaagtgtggcagcgcatgcccgttgccccagctactcgggaggctgaggcaggagaatcgcttgaacccgggaggcagaggttgcagtgagccgagatcatgccactgtactccagcctgggtgacagagcaagactctgtctcaaaaaaaaaaaaaaaaaaataggttaatatgaaaatatgtctgacatatactgtgaagtgaaaaattcaagtcatagaagagaatgtagactgtaatctaagctgtgttatcttttagcataaaggtagtcatataaaaacatggtacaaatgcctggtgtacgcacaaagacagtgcctaaaactatatatcagaaaacagcaagcagagaagaggaaatgggagtgtgggaaggaggggaagatgagaaaccagcaggtattacttttaaaataaagagtgtatcttaaaaatatatacttgatatctggttcaatttggtgtttgataaaaaggagctgggctcggtggctcacacctttaatcccagaacttcgggaggccaaggcagatggattgcttgaggtcaggagttcaagaccagcctggccaacatggtgaaaccttgtctactaaaatacaaaaaaaaaaaaaaaattagctatgtgtggtggcaagtgcctataatcccagctactagggaggctgaggcaggagaattgcttgaacccaggaggcagaggttgcagtgaactgagaccatgccactgcactccagcctggacaacagagagagaatccgtctcaaaaaaaaacaaaaaaaggaaaaaaatacacttgatagaaatataagaggaatatatatagcctacagcttaacaaagattccccatatttccaaacagaacatgatggtaaatttaagatatttagcattatttggaaaatacatggttaggtaatcttaaggtaatctatatttttatttgatgttttgttataatgtcattgtaatagcactaaaacatacttactgagtaatatttaaaaataatttcctttctttgaataatccatcaagtagtaaattttacattcaattaagtgaaaaggtaaatgaggaacatcagaaataaaataaaatagtgttagagaattttccttaatttatgccaagttttgaaacaaagaatgaaatctctggagattttggttatgctaagggtctatctagtggaaatcaagatagctttgaattttgtcgtttccaagaaaatttaagtattgtatggtatttgataatttctaatttttttcttatgaagaaaagaacctaaatttccataatctaattcaatcccttttaaaaaatcaatcataaactgggtttccacatatattttttaaaatctcttttacagtgacacaattaagatgcaaattatttagatttgctcaagtttgcttgttcttgttcttccaagttctaggtcaaatccaaagttaaaatacatgaaagcttttgatttatgaagtagacaattttgccttcaaaattacaccacatgacctcttcttatttgaggaatattttctttttccctagggaaaaaaattatcctaaccccaaaatgatagtgtacctctatacctgtaacagcaactggcatatctgtgctcaattatgtttgttaaatgaatggtccttgttaagtacgatataagcaaatatcaaccttctttgccaagttctccacatgtaaatactgttagaagagtttttaaagaaaaatttagtgtttgcaattttaactctcgtatcttctgatttctacgccaatgctcttatccttaaagccacatttgtcccttggctgaagagttgtgaaagatcaggagacttttagaacctatccataaccagtgttggcatttgcaatatccatgattgaaacaaaatattttcaaaccaactacttttactaaacatgcaatgtgctggccacttcaacagataaccgggctttgaggaggtataggtgtatttcaagaaatgtactatctagctaggaagagagaaggataggtaagacaacagcaatgggggaaaaaccacaataatrtatgacgaatgttagatgtgactttaagagttcagggggcggcggsggtgtgggggcggagccgggcgcggtggctcaagcctgtgatcccagcactttgggaggccggggcgggcggatcacaaggtcaggagatcgagaccatcctggctaacacggtgaaaccccgtctctactaaacaaaatacaaaaaattagccgggcgtgatggcgggcgcctgtagtcccagctactcgggaggctaaggcagtagaatggcgtgaacccggtaggcggaggttgcagtgagccgagatcttgccattgcactgcagcctgggcgacagagcgagactccgtctcaaaaaaaaaaaaaaaaaaaaaaagagttcagaggagggtaacggagggaaatcggaggctgtttcagaaggtgcccagcaacaagtgggacttaagccggactcctgcaacatccgaggtgcgcacgctggcccaggatcctaacaaattgctagtcggtggctatgagtcttagattatcagggactctccgggctctgcggacacgcagaacgcaggcgccacgcaagccggccccgccctttcacccctccccgcgctcccgggccccgggcgcgccgcctggaaccctcccggtcctggctgggggcgggcgaacgaggccccacctctgccgggagcgggacgagcgcgcaggcgcagtctccccaggttgtagacgctgcggcccggcccggcggggtgagttgagaacgcggcgctttggtcgcagcggcggtatggtcgccgcagtttctcggtcttcgcttcggcgaccttgacccccttgtgggtgggcgaggctggaagagaggctccccaccccactcggcttcctgatccctgggggcgccgggcggtcaccgagggccgtgtgagcgccgctctgccggctccgggtccatgcggctgcgggagaagccctgggcgtcggggctggcctgggaggggcccgagtcccctggtgacctgggcgcgcggcggcccccacccccttccgtccgcctcatcgcggcgcatttctcttcacatcctcggggtgtgtgtgtgttggtgaccggaggaagcctgtctaatgacttttctggaagcgtcgtgtattaggagctccggggccggactgcttgggtccgcatctccatccaccgcttactggctttgggacctctgcaagtcacttcacttctctttctcagtttcaagtgtaaaatgcggaaaataatagcaacttatctcstaaggtggttgtgagggttgcgtgggttaatatttgtgaagtgcttagaactgagcgtgatacacagcaaaaccataagtgctgctcatctttttgagcttggtatataaaaggagatagtgaccttttcttctctttccaacccccataaataattgcccaagagtaggaaaaaaggattttttttcttaaggatatgggctttttgcatagcctgtttaaaaacaaagctttctaaacaacttagttgcacatcctactttagagaaaagacaagtgttaagtgatggtgacttgaaaactgtaaagtttattgtttggaaaaccgcatgagaaaaatggccagaacatatttgtgctaaaaagagttaacatagcaggccttaagactgctatccttagaaaggactgcttgcaatgttggtgcttgtttggcatctgggaacttagatttttgggtttgtgctgaacagtatgttttatgccgaaattaccagcttctgtaaaaatccgggacaccaagtctttaatgggcttccctgcgcggaaactgctgcattttcactgatggaggaaggatgtgttttgtttgacccctcttgggagggagaccgcataaggagcctacacgtgattcctccagactccgcttgtgtctttttctattatgatgagcctttatatccatactgcattgtgtaataaatgtcagccatgaattcaactatatgttgagtcccgtgcatcctatcaaagctctaaatgtgggggagatcacggagatcctcagccacagttttgtaaatttgtataaaggtaagggatataagtgccgtttttttacgaggatatatttcctagtggtactgggcttttagtgtaaccatcacctgaataatgtacattgtgtccattaagcaatttctcattcctcaccccactcccatccttcccagtctccagtgcccagacacaattttgatgataaaaagtattggaagctctaataattggacttttaattttgcccttttgcctcaaatggaaattggaaaactacagataaataattgccgaattctgggttactgtaccaaatgattctgtctgtttagacattacatatggcagaaaaatcatcagaaattgcctctacattaccaagttaattttgagtcagtgtttttgaaaaaaggcacaggttgcttacagtatgtaggtcaaatgcctggttttgtttattattttgctagcattatctgtgttaatgctcatctttatcaagagcttatctgtaccacagcgagaaaatataatcagtttctcataggccattttccctgtactttattagttatacctatctcttttcaggacatcaaatttaaattgatggaggtaggtttgcaaatttggggttagaaagatcaaatttgccgtctgcttatgtctcttttcccttataaaagactagatcagtttttggtaagttagttgggagttggaggggttagaggtttgaggaaagtgaagaagatttgaaatggctctgtggatagtatgtaagttgaccagaaggtgaagtgaataataatggacctagtctgctttcttaagagactttctcccgacatggagaaaatggttaattgggttcatctaggattgggttctgcgagagaggtgatgtagtccttaaggctctgcacaagtattccggttcacctatttttgggtacatgtaatgctgcactctttgtacatgggcaacccctctccatgtctgcttgaagttaaatgtgccatgtgacttgctttaggaagcagctctccatttgccatttccacttctccctgccctgctgtaagggtcatggaaggacttgttgagatgcagcctcttgtcagcctggacactataggaaaatatgagtggctgatcaggcaagttggaagaactgggaagttgctrtcagagaaggggatacttaaattagtgattttataaggtggaactgtaggggagagtagatgaggargtttggagggagaaggtagagatgaagtgctcaaggaactcagaggctttttacatgttcctaacccggaagcccttaatttattgcaacttagttcagtagtgatgaccgttggacttaatggtaaacttgaaagctcccttattgtgaattatggaatgaataaatcaagatttggaatttagtactgaattgaaagattcattaccttgatcattgagaagtaagtcagcaaccatgaaaattrcgatgttgcttagccaccaggcaggagagtaaaaggtaggccaagctactctaacagagactccaaaatatagtagttttaaaaaatgcttagcttgtatctaaaatctttgataattaactgaatttttaataaatataagggatagaggtaaataacactatgaagaaagagacaaattcagtgtgagacattatataactttgctgtcgaaagagtattstatgggcccccagcagtggcttcagttagaagctttttaggtaggtagaatctcaggtcttgtgccagacwtgttgcatcagaactttcattttaacaagaccctcaaggtgactyatgcactggcctgatctctttaaaaagctaaagtcttaggcaagtaacaggttggaagaactgttctgttaatagattaaaagatactaaagagacataaccaatatcaagtgcaaaccttgattgaatctttttcaaaaaaccagctatagaagacaatttagggtcaactaaggaaattagaatatgatggaatatgagatgatattagaaaattattaattttcttagatatgattacattgttatataggagaatgtgcttatttttaagagatacatgctgaagtatttagggatgaactgtcaagatctctacaactttcaaatagttcaactatgtgtawatatatatatatatatatatatatatatatatatatatatacacacactcacatacatatatgtgtctctctatacacacatattgatatttagataaaaacaaacatagctaattgttaataggtgtggaattggtggggcaccatggctcatacctgtaatcccagcagtttgggaagccaaggcatgtggattgcttgagcccaggagttcgagaccagcctgggcaacatggggaaatcccatctctactaagaaatacaaaaaaattatctgggcattgtggtgtgcacctgtagtcctagctacttgggaggctgaggtgggmgtatcacctgagcctggggaggtygaggctgcagtgagctgaaatcaggccactgcactccagcctgggccatcagagtgagactttgtctcaaaaaataataatagccgggcacggtggctcacgcctgtaatcccagcactttgggagactgaggtgggcggatcacgaggtcaggagatcgagaccattctgactaacacagtgaaaccctatctctactaaaaatgcaaaaaaaattagccaagcctggtggcacacgcctgtaatcccagctacttgggaggctgaggcaggagaattgcttgaacccaggacgtggaggttgcagtgagccgagatccatctcaaaataataataataataataatagtaataataatataaatgtggaatctaattagtatatgagtgttcattatactgttcttttaacttttgtagatgtttaaaatttttcatgataaaaagctagagtgaaaaacccccaaaaatgtagtagcttaaaaagatagaaatttaattttctcttaatattccagtgctagttgtacaacacaggtatagagtggctttactatgcttggcttacagctrtccatttttgatccagtrtggctcatccagctcctactatttccttgctagcagaagggaggaaagggtaaagagaactcattatccagaagcaatacttactccgttgatgaaaactttagttttggtcattcacctggacatcatatatttaggggttgtgtcttggttcagcctggtatagcaaattattatagactgggtggtttaaacaacacagacttatttctcacartactgggagctgggaagtacagggtcaagatgctggcaaatctagtatctggtgagggccttcttcctggtttrtagatggccatcttctcgtatatcctcatgtggatacaaaggtagctttctagcctcttattataagaggccagtctcattcatgagggctccacctacatgacctaattacctctcaaaggsttcacctccaagtatcatcactttggggattagagttcaacatatcaatttggagtggggacacaaacatttagtccataatggtatagttggcaaaagccaatggaatataccatgtgtatactgatttaacaaagatttatttcatttcaartgatgttcccctcttcttcctctgttgatttcccggaccagttgaaattgaagtcatttcagttttaatacacattaaataaaatataaaattttaattttgaagactaaaatgtatgaatttttttccctcaatcccttcagtaaataacagatgcgggtgaaagatccaactaaagctttacctgagaaarccaaaagaagtaaaaggcctactgtacctcatgatgaagactcttcagatgatattgctggtaaattgtgatatatggcatcccaaatagtgttgagaagaaataacaatgcagttgacccttcaacaacatgggtttgaacgctgaggatcaacttgtacacaaatttttttccaccaaacctagatggaaaatacactattcttgggatgcgtgaaaactgcatacttggcaggctgacttctaaatgcagattccacggggcccactgcgggacttgagtatgcacagatttgggtatatgtggggaggtcctagaaccaactaccccaccccacctccctgcctcaagtatctgagggaagactgtatatgtttttaattaagaaatctgttactctttatttttactgttttctgcataaatattagaatcaccttttctagttccaaaaaatcctgttggcatttttattaggattttgtttagtttataacatgaagtaacttagattggctttttttttttttttggtctctttctcatggcctattaaaaccatgtcaccaagccaccagagcttggcagatggcttttgggagctgctggcctcagggcttggttttctctttagcctcatgcttttgatttgggcctctgaggattttcctcactttcttgctagttctctccatttaaagggatatttttaatatattttttccattttaggtatgcatagttgcatacagctatacacaaacacactcacatatgagtgcctatgtcttctgaaatccgaataagttctaaggattgtaccaacgtcagcttcctggttttgatattttactatagcagtgcaaaacattaacatcaggggaggctcagtgaagggtgaatgagacctccttgtatatttctttataccttcctgtgaatctaaaattagttcaaaaatttaaactctaataaattagggacatcagataaggtcctaatgatatttaaagagataattcagacatccttcagtgcagcaaactggctatcgaaacatcatcccattttagtacatgtatagctttgtataaccaccaccaatcaagatacttgactgtgtcatcaccactctatgtgctgtccatttatagcaacaccctctgccttgcgtccattgctcyctacaaccatgaatctcttctcattctataattatgttatttcatgaacattatataaatggaattatatagcatatatcttttgagttattttgtgtgttcartctctgtgctttttagttaacagcatttaatacttttgaggtttgctcagtaatggtagcactttggtgtagcaaagaaaatgttgagattttgttttatcttattcagtaggtttaacttgccaacatgtaagtcatgctatcagcgtgaatcatgtaaagagagcaatagctgagaatctgtggtcagtttgctcagaatgtttaraagaaagaagattctatgatgggcagctagtacttacttctgatatttggttgtgcctcaagtgtggcttccaggtaagaaaagtattatttatatgtgagtttgtctgaaatgttttccttaaatgcttattgtgagttggactgttggtcatgcataggagttaagataaatttattccaatttagatagaaattttccaggaatgaacttaaaaatgattgttaaggtaaagtaaaaggtatgctatgttcagaaagtaatcaggtgtggtttataaatacttgcagaggtaattcaacctatttgcagtagttcccatatctggaccagtctttaccttttgtatttacttaggaaatggatctacctttcagattaatttttttctctctcaaaacagattattctgctgcttttgcaaagtaatttaaaatcttaaagtttaaaagttattgatatctgtaataaaggaatttttttaatgaaattaaaagtatatacttttttaaaaaaataagagaaatcttyattatttcacacaaaatgtccagaagtaaggccacttcaggattagttaatttaatggaaagaacattaaaaactgaggtttattctgttttctgctgtgccatcctcaacctcatggttgtgttcctcttaaaaaacaaacaaaaaaaaagccttctggaaagattcagcggatttgacttcccctcatgttgcattaaccagaattgcatctcatttctttacttacctagtgagggaaatcgctatgattggtctgtgtctcagtagttctcagtaggctggggtgaagttgtgtacgggattgggaaatgtgtgtttgcagaagggcaccactggcctgccaggatgctgggtgttccacagtgtgcacatttttaaatgatagggaaattaactttgcccatgattgttttaggtaaatactgtatattgagcatgttagcctgttggcaagaaattaaatttaatgagaatccatattacttttttgaaactttctcctctggcctgaaattaaaaacaaaacttttcagtataagtgtgagtataatttaagttttgattaatttgaaacaaacatttgtaagtcatacaaaataaaattctgttcatcttcagggatgtggtaaaaactcagaaagccaacattcattgaagcactttaagagttccagaacagagccccattgkattataattaatctgagcacatggattatatggtaagttaaattttgttagttcttgtgtccactaaccacagccccccaatttttttttttctttaagcttttaaggtaaaatatttaaagatgttctatcagcttatggttttttaacctgaacacaatctatgggatacttcaagaaaattaatattacctgtgaatataaaatttaaattggaaaaattttaactatctctctactttttgttgttgttgagacagagtctcactctgtcgccaaggctggagtgcagtggcgtgatctcagctccctgcaatctctgcctcgtgggttgaagcaattctcctgcctcagcctcctgagtagctgggaccacaggcgcatgccgccatgcctgcctaattttatgtattttagtagagacagggtttcaccatgttgcccaggctggtctttgaactcctgagctcaggcaatatgccctccttggcctccccaagtgctaggattacaggcgtgagccactgcgcccagcctttctacttttctctatcattttccttgtataatgtaaagaaaaattctttttagttgatttttttggtagtgaacttgctaatacagaattctagtgttgtagagaaggaagatacttcaagcagtcaggtcattttctgaagggagagggaagagctgggcataagtagcttgtaaaaacttttcaggtcattctgctgtttaatcctggttgagaatctagtccagtttcctatgttacctgtaaggaaactatgtaatatttacctttttgtggttatgaagtaaaaatccaggtactaaaacaagttttttgtggggcgtgatggctcacacctgtaattccagcacttagggaggctgaggtgggcggatcacttgaggtcagcagtttgagaccagcctggccaatatggtgaaaccccgtctctacgaaagatacaaaaattagctgggcatggtggcgcacgcctgtagtcccagctgctcaggaggttgaggcaggagaatcgcttgaacctgggagatggaggttgccactgcactccagcctgggtgatagagtgacactccgtttcaaaaaaaccaaaaacaagtttttttattttctagtttcttattagcatatcacactgttttggtagtataaatggacactatgttgaaatgcttcctctgtgttttacaataattttccaacttgaatctatggactcctaagggttccttgaatgaattttcaggagtctcagattttctttaacataaaaatattttgtctaaaattaatataagggtattttggctcacagaagaggtcatcatctttaatacagccagaagggttgggcaccagctgcatttgtgtttttatttgttgttgtgagtcccaagtagtagtactggggagaatgacgaaagaacagagggaacttaatatataaatgatgcattggaaccaatggagacagcaatggtgccatagtgtggcagttcaataaggatttcactttagtggtctcaaactctaggtgcatcagaatctcagggagatcttgttatgacagattgcaggatcccagtcttagaaattctaatttartagttctggggtggaggagccagagaatttgcatttaacaagctcccaagtgttgccagtgctgctggtctgtagaccacagtttaagaattactgaattagaaaaaggtgggtaagaagattgtgaacatgtaatgtagcattggtgtaatgcattatgttttttttttttttttttttgagatggaatctcactctgtcacccaggctggagtgcagtggcgtgatctcggctcactgcaacctctgcctcctgggctgggagtagctggaattacaggtgcccgccaccacgccctgctaatttttgtatttttagtagagttggtatttcaccatattggccaggccagtctcgaactcccaacctcaagtgatcctcccgccttggcctcccaaactgctgggattacagttgtgagccactacacccggccataatgcattacatttataaaacactttgaacactttccaacacatgttcttaaatgatcactggatctcatgaggataaaggaaacaggtaattataatatacagaagaaacaaattaatacgatgtattaatgagtaaacttaattgagggtagttttctgaattggaatgtgcttttgaaaatgtctttcctaaccctctgcctccaaataagcgccaagcaaaatagaacagctatttctttgagtcttacctatctctatatgtaatcaagctagaagcctggcagttatttccttccccctttttatcttattttattttttagcctgttaacaaaagtagacagagtggtataatgaatttacctatacccatcaaccagcttcagttgttgttgttgttgtttttccagctttaaacattatcaactcacagcaagtcttgtttcgtctaggccaggatttctcaatctcaatactattggcatttggactgttaatgttctgtgattaattccttgctgtgctgttctgtacgttgttggatgtttaccagcatccctggcctctacccacttaaatacaagtagtggtcctctcacctctcaccagttgtcagaaccaaaactgtcaaatgtcccctaggtggcaaaatcactcctcattgagaatatcagtgattctcaacaacattgagaatcgctgacattgtctcactcacttctccctacccatggcagttattttgacacttccctttccctcctcttttatatctaatttgttactgtttctacctgcaaatatgtatataaagaatgcccatttctctccagatcctctgctactatactaatctgtttctcttcctaatgccctccaatccctccaatctagtttatcacattagtgagagtgatgtttttaaagtgtaagttggggctgggtgtggtagctcacaccggtaatcccaatactttgggaggccgaggcgggtggatcacttgaggtcaggcattcgagaccagtctgaccaacatggtgaaaccccatctctaataaaaatacaaaaattagctgggcgtagtggtgcatgcctgtaatcccagctactgggtggctgaggcaggagagtcacttgaaccctggaggcagaggctgcagtgagctgagattgcacagctgcactccagcctgggaaacagagcgagactctgtctcaaaaataaaaaataaataaagtgtaagttggaccatatcatggccctgcttaaaaaccctctcgtggcatttcattatacctaagataaactgccaaaactttcatttcaactgtaagtctctgtatgaattgtcctctgcttatttctctagacttacctggtggcttcccctttgtattccctcccatgtaatttaaagacaaaagtaactaaataccaactttgttatctgatgtgcaaaattattgagaatattttcataatrttttcttaaattttataytttttcaggtgttatgaatgygatgaaaaattatcaacgcattgtaataagaaggttttggctcagatagttgattttctccagaaacatgcttctaaaacacaaacaagtaagttaagcgatgactaaaggaatctgtgttaaaatacagtatttcatatagagttcataaattcataaagaatactttagattttactgtgacagcccagccaataatttgaataaagatattatgagtatcggctgggtgcagtggctcatgcctgtaatcccagcattttgggaggccaaggtgggtggatcatgaggtcaagggtttgagagcagcctggccaacatggtgaaaccccgtctctactaagaatacaaaaattagccgggtacggtagcacatgcctgtaatcccagctactcgggaggctgagacaggagaatcgcttgaacctgggaggggaggcggaggttgcagtgagccaagaacatgccactgcactccagtctaggcaacagagcaagaccccgtctcaagaaaaaaaaaaaaaaattatgagtatcatgcattcttaggtggccaccttgttatacgtttatataaccaatttgagaaactgaagtatgtcgtgtctagaccatgggctttgaagtcagtcctgataagtttgaatttaggcttccccacttactggccatggtcacttttattgcttagtttacttatttataaaattaggatgataattctgtcttatggagttactgtgaggcctagagataatattttctaaagatttagcaatagtgcatgtaaaaatacttgcatagtacctgtattagtcttttcttgtatttctataaatacccgagattgggtaatttataaagaaaagaggtttaattggctcacagttccacatgttgtgcaggaagcctgctgctgtcatcagctcagcttctggggaggcctcaggaaactttcaatcatggtggaaggtgaaggggaagcaggcacgtcttacatggtggaacaggaggaaaagatagacgaggaggtagtacacacttttgaacaactagatcttgtgagaacacactgactatcatgagaacagcaccaaagtgatggagctaaaccattcgtgagaagcccactcccatgatccagtcacttcccatcaggcccctcctccaacattggcgattacaactcgacatgagatttgggtgtggacacagatccaaaccatatcagtacttgacacatatgtatgaaatggtgtctgttatttgttacataattgcagtgtagttctgacactaactactgggagttaggccagacttcacaggctaagggcacagttgcccacaggactgccctcacatcagaaactagctgcaggcttgagggttcctagaccactgaatttctgaccaactgtccacaaatttgggggttcctaccatttcttcaggttcagtgataatttgctagaatgagtcagagaactcaggaaagtgctgtactaacaattatagttttaatatagcaaaaaaggatacaaaacagccaaaggaagagatgcatagggcaaagtctggggagggtcccaaatgtgaagcttctgtgtccactccagagggaatgaggatgcattctcctcactctccccagcccatgcattcgtgtgcactaatatacacaagagtattggtaaccaaggaagctcactggagttttggtgtggagagttttattgggatttcattgtgtaggcatgattgattgaatcattggccatattgatttaactcagtctctaggcccccaacattctaatcacatggttggtctttctggcagggccaggccccatcctgattcatctcttcagcataaactgtctaggggcccacagtgagtcagtttgttgatataaactgtcaaatgtggcctgagggacccatcatgaataacagacactcttgtcgctctggaaattccgaggatttagagggtacttcccaggaacctggggagaaaagccagccagatcctttattatataacagtaatgtattatgtattttgttattgtatactttgttacctaacaaataaataatacataacgtatgttaagagtgtataggataatagtttcttcctccaaaaatagtaagtgcttcccacatgccaggtattaaattttatttggtctgtagtattagagtaaaacaaaaatagttttatcttgccctctaggcgttagattatagtgggagcaacaagcaaaaaatgcaaatatataatgacttctggtaagtgctacaaaagaaaggaacagattgccgtgctggctaataatatagtagtcacagtgatcaagaaaggctaatattgcagaaacgtggtttgttaggagagagtgcaaagagatgaagttacgaggtagatgagctggtcatgacagatactgtaatgaactccatggtaaggaatttttatttttttggaagtgtaatagaaattactaaagtattttaagcaggggggtatcacggtaatttcatatttttttaaaaaaataaagataagtgattgctatgtggcacacagattgtagggagttaagcatgggggtggggagatcatgaagagggttaaggaggtgattgtgggggggcaggtgagaggctgatagatactcatggggagtgagtggattacatgtagtgagggagggagagtgggaggaattaagtattaatacaaacctcaggatttttactgaacagctaggtgaatggacgtgataattttgagttgcctttgaagcagaattgaattgcttagtaggtggcatcagaaactgaaaagctatataaaaatatagttgccaactgtgttttctatagcccagtgtacagctgtttttgttagccatcrccctaatgagacagtaatggtgaaggaactggaggaggaaccagagaaggtaaactcaggctcctggacagcagtagaagtgattcatttgatcacttatcatttacttattcaacaaacatttattgaattctgttctgcagcaggcatactagtcgtagctccaattctgctcaaataaagaaccaggaaaatatggtggtgaaagacttgtaacactactggaactgaagttggtcataattctgtctgctgaaaaatgagcattaagtttcattggccataataagaagataggcagggatatgatggcatgggtgatgaaagtacaagtttagaaattattttctctggattttttttttaccttagagattccctaaggttaagtacaaagccagtctgattttcattcaattttactgatttcttgaataagtattataagaaagatgctaggaagggagcatggacggtatgatggaaagtacatggctttgaggttgggcacggtggctcaggccttaaacccagcactttgggagcccaagtcgggcagatcacttgaggccaggaatcgagaccagcctggccaacatggtgaaaccccaactctactaaaaatacaaaaattagctgagcatagtggcacattcctgtaacgccagctactcaggaggctgaggcatgagaattgtttgaacccgggaggcggaggctgcagtaagccgagatcacaccactgcatgccagcctgggcgacagagtgagactgtctcaaaaaaaagaaaaaaagacagtagatggctttgagtcagggggtctggtgttcagatttgactctgtcactaggtgtgtgaccccaggcagtaatctgtttatgcaagcctcatttttccttagtactttatatttccaaggtgcttcagggaatagagattgataagacagtcactaaatctttaagaggctaaagatctgaaagaaggtgtaagattaaacagtaatgatatgcaagtagagtaagatttctgttttaggtaacaaccaaagtccttcaaatatccaaagagggatataatgttcagttgtaggaactaaaaaggaatcatggatgagccggctttcaagctgacccttaaaggatgaactttgggcaggtgaagatgagagaagaaatcatttcaggtggtgggaagcactaatataagccttaattgtgtttatggaaccgtgaatagcacctggagtggtggggcacgggcttttgaggtagtttgagagggagtggagctttcaaagtttgagagatacatagttgttagtttaaggcttttggcagttctagggcaagatgtcattatccctgtgggtcaagctacaggatctctcaggcaagtttgatttaaaataatattccttggcattctagaataagtttttggatataatagtttgccatattgtgccttgtatgcggcttccgtatatttttataaaatatttggaaaatcaaatatgaaagtttttattgaggtttgtaagaatgccggatatgattttgcactaaatggtaatcgtgaaacattgtgaaaacacctatttatgataaaaggaatatgaaactgtattattgtgtttgggtgagaggataagtatgattttaaaaggttatttttatatttttgtactaagtaaaaatagttattgagaagaaagcctgtgcctgtatgttaaacacattttgaagttatgcatgaccagaaattttctttctctttaaagcatgtcattaattcttttgtttctttattcctttacttttaggcatcactatcctaaaatcatatagtatatgggtggctcactcctgtaatcagagcactttgggaggctgaggcaggcagatcacttgagtccaggagtttgagaccatcctgggcaacacaacgagacttggctctaaaaataaaaatgaaataaatactatgccatgttaacacaaataacatttgtagaaaagataactttcaaaacaaaaatataatgagtggcactgtcttgcatttttataagactcttaagtgtctggcttagtagaaaacagctggattctcatatctgcttctgcatttaatcctttgtgatatcacatgccatatggcctctggagaacggcattgtataattgagagtgaatgaaagtaaaaaaagcaaataaaatcttaggcttattatgaaaatacttttgaccttaagtacccttgaaagaaggaagttgtcttctgacccactttgagaagtgctgaactgtagcacatttgtctttatattttctgtcttcagccttacttatccattaaggctcagctcaaatcctacttctaggatgctttcccaatccttatctcttttttggcactcagtgtctgtgcagcacactttagaatctaataacacacttttttgatgtttcatatttatgtttgtacatgtcttattttctctcaagactgtaggttccttaagactggactctggattatattctttttgatttttatgtgggtagacagtaaatacttgctgaataaaccaaatagaatgtgaccagtttttgttgaggaagtagatagataagctttgcactttcaccctccaaaatcctaaatattaatatcaaaattatttattcagtcttttaatatctctgagtttctgctttgtaccagatgctgcattagatgttggagatgcagtagtgaatgagacagatctacttctagttcctgtcattactgatcttttggtctattgagggatatagacaaattgcacttagttatacttgcctgtttaaatagtgctgtgatggagcaagtacgagggaccgtgagaacaatttggaatagtayctaacattcgactggaggagtcaggccaattctatttagaagaataatccgacttagttggaagcagaagaatatctagaaattatctggkcaaaaagggaacagattgtgtgttccaggcaaagaaaatagctcattgacgagagctcgataggttcaggcaagtctagacagctgaaaagttgagttttgtggtgtagaagatggtgagaggtgagacttgaggtaagtaagaacagatatttaagggccttgtacagatagaatttgttctgagggcagtgaggaaccactgttaagttttaagcagagaagtggctgatcagtgattttgtagatctcagtttgacttgtatggagacagataggaatgcctatatatgtataactgcccatttattatgttaatatcaatttatcatatgactaagtaaagatttctaaggcataatggttaactggaagttagtcgattttgagagtaaactggcaagctaattattatttggttccaagctaggggaattgtggggcaccaagttgtctctttttactcactctttaaatattaaacttcttttcagctgtagaaatgggcagattacattaatactacatgactggtttaggtaattgcattaagcagttgagatgaaccccagctcaggttcccagaagaatgcttacagctgtgtagatttcacatctgatgttaggatttgcttatagaaacaaaactccctctacctcccccttccccatacatggaataaaaaggtcatatataatgcaagactgaaaatgggcaaataagcatttttgtgagtcccacccagaaataggtattgttaaaaagtagaccagaaaactggagacagtaaaaaaaaaatcagtggttgaaaggggttgaggggaagaaggggtgaataggcaaagcacagagaattttttagggcaataaaactactctgtatgatactataatgctggatccatgtcattctgcatctgtccaaatccatagaakgtacactgccaagagtgaaccctgatgtaaactaggaactttaggtgataatgatgtgtcagtgcaggttcatcagttacaataaatgaagcattctggtgggggatgttgataatggaggctatgcatgtgttggggtaggggggatatggaaaatccccattaacgtatgctcagttttgctgtgaacctaaaacctgcttgaaaaaaaatttttttttttaaagtgggccattgtcctctgaaagtctcagagatttctcactttaatagtcttttaaatgtcatgaagtgttctacaaatatttagagaatctaggaattcctggtaaaatcatgtagttgaatattggtttattttttgtgaaatagatgactgacaatcccatgttcttttctaaaccaatgcatttggctcataattttaatattgatgggatgccatttttaacaaggttaaagagaagacaaaatactatatcctgctgaatttattaagctcatgctcctggtttacaatagacatgaattatgtgggttttatgaagtatgagtttgctgtatctttttttttttaaataagaaagtaagtggtggtatgtttgggatctgaaactccatctgagtataatattatgacctgtttcagtaacaatttgattactatttaatactttaaaaaaaaaggtgatacatgctgggcacatgtatggctcatgcctgtaatcccagcactttgggaggctaaggtgggaagattgcttgagaccagttcttcaggacgagcatagacaacataacatgacyctatctctatttatttttgtctgtttttttaagaggtaatacagttctctaaagtgacagtcatgtttctaagaaatttgcattttcaaaaataagcactaaaaatcgttgtttcagtgtatacaaggggctaggttcaaaaagataatgacattttaaaaacaacctatttttacatatagggtttttaatttggggttcctcatcgatactacaaaacacagtaaaattattagagtgactattttctcagttttcccaaagatgtcacataactagtatccttccagatacatagggagatgttaattgcatgcagtgggtacctaggatgttagggtgttaattttttaaggaatcatttgagaaggactgctacaaactatgactaaaaaagctataaatccaaacacaaaacatgtgcagcaatggattacatacagcttttacttaagagtaatggctttgctattcatatcaccactggcattttgttagtgtcttaaactactatcacacttataaattgcatcatctttattataacagacagtagataatgtttaagtgtgtgaattctgaagctagactgcccgggtttgaatcttccctcaacactaaccagcagtatacctcagtttcatctttgaaatgcttcagttctaaaatggggacagttatcagaggtgacaatttaagggagatacactctcaaactatccgactctaaatgcaaaataagttcacttctcccttgcctatgggaagaaagggaagaaccagtgttccccacttttggtttaaccaaggcaattcacaaatacacctttgggaaaagaaagacaccaatttagtattacttcacaacaaacccactattggttgttttcaattttctcctgtgataaacaaagctgtatctttgtatacttgctcttttattttgtaggtgaaatttttttggaatttcttggccaaagtataaattttgattactgttgtaaaactgccctcaagaaagcttgtacaaagggtatagttgacaatagtgcccataattccatatttaactttgtttatagttcagttttgccataatgaagcttttaatgtcattgttgccaggtcattagtcttttctgtttttagcctttggggtcatgctttgaaagtctttgctctccaagattctaaagatattcacctaaaatttgctggtacttttgagtttttttatgtttatgatttaatatccttgaactcagtttttttgtttgttttttgaaacagtctcactctgtcacctagtctggagtgcagtggcatgatctcagctcactgcaacctctgcctcccgggttcaaacgattctcctgcctcagcctcctgagtagcttggactacaggcaagcgccaccatgcccagctaatttttgtatttttagtaragacgaggtttcaccatgttggccaggctggtctcgaactcctgactttaagtgatcctgccaccttggctcccaaagtgctgggattacaggcatgagccatcacacccagccttgaactcagtttttaaaaagatagttataggatctctaagtgttgaagtaatttttatgctggaaaaatttgaggtaatatcttaagttttttttttaaagttcttagacaagttgttttgttgtttatgttgttttgtttttgctttgctggtatttcagccagttttgtctttgaagacttgaggtacatgcaaaacctatcagtcctcaatcagctactttttgaggactcagattataggcttaaaggtaaactacagagatgtacaagagctttaaaaactttaaagtgccgaaagtgtgctctcaatgttctttgcattccaggtctatattatctttttatgtaaaggatgacagtgttagtaatatagaagtgataagtagagtaaattaaattgcttttattttttattagttttgatttatttcccaaggtgagataaatcccttttaataaaataacctagcctggaaactttgtgattacctttttgactatgcagaccactttttttgtaggtgtgggtaaaactttaggagaacaaaagaaatgataataaaaattttgtatagtttgtctttattgttgtagcaactttgtcctcttacttatatcatacttaaaaacatcttgaagttcattccttattgtatttggttctgtgtttataaaggaagaagagaatttttaatatcatctaaaatgtttgcactgccagattgaaaaatgctttgttatctctgaaaacaaaatgatcaaaatagttcttcagtagaagctataagctgctttttattaaaacatacaggccaggcgcagtggctcgtgcctgtaatcccagcactttgggaggtccaggcaggtggatcacctgaggtcaggagttcgagaccagcctggacaacatggtgaaaccccatctctactaaaaacaccaaaaattagctggacgtagtggtggacgcctgtaatcccagctcctcaggaggctgagacaggagaatcatttgaacccaggaggtggaggttgcagtgagccgagattgtgccattgcactccagcctgggcgacaagagcaaaactccgtctcaaaatacatacatacatacatacatacctgcatgaatgtcaagtaattgagactgattcagacatccctgttttaaactagaattgtaaactctcagttgacagcttcttagtaaacacatgcacaacaagtatatttagtgtctaaacgttttcctgagatattacagttatcataaatttaaggcttggccgagtgtggtggctcatgtttgtaatcccagcactttgggaggccaaggagggtggatcacctgaagtcaggagttcaagaccagcctggccaacgtggtgaaaccccatctctactaaaaatataaaattagccaggtgtggtggcatgtgcctgtaatcccagttactcgggaggctgagacagaagaattgcttgaacccagggagcggaggttgcagtgccaagatcgtgccactgcactccagcctgggcaacagaatgagactccgtctcaaagaaaaaaaaaaaattaaggcctaaggtctctgctgtttactagtttactatgtatcaattctttatactccagtcataaataagaaattaggtgtaaacagttatagtggttcatatagtgcctgatacacaaagggcattgataaatcaatttaaattgttacattttgtaaatgtactccttagtaaaatttaagacttacacttttattttaagtaaaacacttaaatagctcttagaaatgttattctggccaagtgcggggcctcactcctataatcccagtgctttgggaggccaaggcrtgcagatcacttgaggtcaggagtttgagaccagcctggccaacttgatgaaaccccatctctactaaaaaatacaaaaagttaggcatggtggcgcatgcctgtaatcccaackacttaggagactgaggcacgagaatcacttgtacctgggaggcggaggttgcagtggagctgagatcacaccactgcactccagcctgggagacagagcaagactctatctcaaaaaaaaaaaaaaattctattttctagttaaattatctgtttgatagcgtagttaatttttaatattttctcacagacttacatgtaaaagtcaacaaacagacccttgccacttgygtgaagtggctatttaaccatgaaataaactctttttattgccactgccctgtgggtatgttctttctggcagtgctgtccatatttggtggctatgcatggagagccaggtggtgctgaaaagcatcacacagtgaagcgtggatatatcttggtttgacatttgtcgtcccttactgctgaagggagggggaaaatctgtttttccatatgtttatgctttattttgcctgcagttttgtccagatggtcttatgaacattgtttactttgggatgccatcccagatgttttgaaaactgttggataaatgtggcacacagatacatttgcatattatggtttttaaaatgttatgtgtctttgcaagattaaaatataatttatttctaggagtattttcccaagtgaataatgtgtctgtgtatatatgtattttttaatgttttttaaaacaggcccaataggcgtcgtgtatatatatttcataagtatataaaacatatatagttattatctataggttatttcttccagccattctgttttcatgttaataagctaaaaaatattgtggcaacatttattaagaatgttaagtctgcttcatgttttggaagaagccaaaaaaaaaaagatatttttgaggagtcatatttgtttagggttgcatatacccaaatctgtaagaatcttgacctactgtcttttataattcttctcattgtacataaatcactgaagagaatttaggtggtaaaatgacaatgaatttataatcagaagattatcattgtgaccttgggcatatcacttaacctgttggagactgagttttataaatgtaaaatcagagttaacagcctgaaaaaattgagtaatgcttggatttaatttctctctcatcttaaatctctcaaaaatcactatgaaaccaccttttggcaacagcaataatgagagtctgaacccatcctattctaggttctatttacagtctcagatataaacaagaagcagactgttctgtctgtaaacccagccagcatccatatcagggttcctcttgtttgtgtagtgcttcttaagtactgactggcttttttcatttgcttttatattcatttgaaaactacctggcctcttcccccttttcttttttccatgcctggtgtttgtacttcagtgacccacttcattgattgtgctggcctttgcccccamgctctagtgtggggtttattatttattataatatttggaggacaggaaaagagacctatcttgctagttcttttctgctttacctcaggattctggagttgggagttaaaaatagytccttaatatctgaacacattccaataacaaccaataacatttaaagaataaaaaaaacaggaatgggggaaaccagttaatagcgtttataaaaactattgtagcacaggataaaagttgttagaacttaaagaaaacttttttccatgaaataggtttgcttaatgaaagaaacatcttctgctgggcgcggtggctcacacctgtaatcccagcacttcctgctccttagaacagggccactcccactcgggttcatctcctttaatgttgtttacagaagtggggcaggtgtcataatttatttcctcttaagaacttgtcagagacgtaagaagctaacccactagttctgctgtttaatcttgcagatttttatgtgtttcgaatttttattatgaacagtccccccagtgctgtacccctttggcaggaagagcaagagtaagagatgttcccctatttccatcaatcagccaaatatttataagttaattagtaatgcaaggcagcatgtcagtattaggtgaaaaaaacatgtaattgtaaagaactataaaatctaagggctggctggctacggtggctcacacctgtaattccagcactttgggagcccgaggtgggtggatcacttgaggtcaggagtttgagaccagcctggccaacatggtgaaacctcttctctactaaaaaaaaaaaagaaaaaaaatacaaaaattagctgggtgtggtagtaggtgcctgtaatctcagcttcttaggaggctgagacacgagaatcacttgaacctgggaggcggaggttgcagtgagctgagattgcaccactgcacttcagcctgggctacaaagtgagacactgttttttaaaaaagaaaaaatctgagggctgaaaggaatttaaaagaacatctagttaaaactaaagcatttcagaacttgggaatttcttatcaaacttcaaattatcataattttgattcagagagtaatctgctaaatacatgtagtcaaccatgtcagtaaatgttaggaattgttctttgttttcatattagtaaacatgaactgataatataattttctttttttcttttgagacagagtctcactctgtcacccagactggagtgcagtggcatgatctcagctcactgcaacctctgcctctcaggttcaagtgattctcatgcctcaacctcctgagtagttgggactacaggcttgcacgcaccaccacgcccagctaatttttgtatttttagtagagacgggctttcaccatcttggccaggctggtcttgaactcctgacctcaagtgatccacctgcttcagcctcccaaagtgctaggattacaggcctgaggcaccgtggccagcctaatataattttcaaatctgcattaattatacaaatctgtaagcacaaaacatgcacttatgtgtcatatacttaggtattttactttttgtattacagtgtggttctgtttatttttaaaaaacttttaatatgaacattttcaaattcacagaaatgttgcaagaataatacaaaaattgccactataggatggtgattttcctaattctgtcatttcttctattagctggcattctcttataaggaagtctcttccctactttttctcatttaaaaaatctgttaccaattcagattcattctgtgaataataatctattatactacccttacttatttttatgatcaaattatctgaattgaacgagctggtcaaaatccctgtgtattttgacttattcccaatcacacattttgagcacttccttactctctggcatggcaaaatgttatgggttcattttgcatctttgctaccctgggttaagaatcagccttttcccctagacgtccttatttcttttcatgggtaatggtatttagaagttagaccttttctacttgttctcgactgttcttytacatttagttttttaattcatctgcaatttattctgtaatatagtgtgaggtgcagatctgtatactaaagtttaaattaattcctctagcaataaaatataaaaccaaagatagttgtgtttatattcttccccttcaggaacactgattcagggagataatcttatttaaatttaattttaaataatgtatataaattatgttaagtgacatatttatctttacatcttgtgtcagttattttttctctaacttgtaggtgcattttctagaatcatgaaactttgtgaagaaaaatgtgaaacagatgaaatacagaagggaggaaaatgcagaaatttatctgtaagaggaattacaaatttaggaaatacttgcttttttaatgcagtcatgcaggtaagagtcatcagaaagctttgtaatatgtaaaagattctcttaatttatgtagtcattggctcacctgtagactgtcaaatgactgctaaatgttcctctagaaatttctctgttttccttttgtttacgctatcttgggccatcaccatatgtatacatgtaccttattttcacacagggcttctgaaaggtcttctgtgtattttaccatggctctatcggtaatagtgacctttactaaatgtaaaatgtactcaactaaatcttaatattttttgaaatagacacttttgctatgctagatgaaatttgagagtgtattccataaaatcagaggcatattttaactgaatctgaagactttaattttgttttcttttagaacttggcrcagacttatactcttactgatctgatgaatgagatcaaagaaagtagtacaaaactcaagatttttccttcctcagactctcagctggtgagtaataactgtttgaataatagctgctttcagatgagccactgatgttaccaaaatctcttttcctaattcgcasatcagtcaactaagatagtagycagggggcttaaaaataatttaaaagcattctgtgaaaataatcagatttaaaatttctaaaatcataactttaaggtatgttatggttccaatatgccatggatcaaataataaaaagatatcaaggcagctttaaaataaacatactggaagaaacaaaagaggtgtgacttctattgagcaaaatgcctataacccctattttgtagtttctggtgacatttgtttaaatttagcatttttgttctttaaagaaagatgaaattttaatagtgagcatctaaaggttttttttttgagacggrgtctcgctctgtcgctggagtgcaggctggagtgcagtggcgcgatctcagctcactgcaagctccgcctcccgggtttatgccattctcctacctcagcctcctgagtagctgggactataggcgcccggctaactttttttttttttttttttttttgkatttttagtagagacggggtttcaccatgttagccaggatggtcttgatctcctgacctcgtgatccacccgcctcggcctcccaaagtgctgggattacaggcgtgagccaccacgcccggccacatctaaaggttttttgaagcctagcctgatgatagatttttaagctagtgagaaagatgaaaaaaagagcagcccctgatattcagaagctggcctggcaccaacagttaggccatgttattcagataatcccacagaataacaatctgatagtaggtttctctgagactacgatgaaataagacaaagcaagtccacttcatgattttgtctaaaacaagatcactttgccatttagaaaatctgaaacaccctccttcagccaaaatgagaaatgaaggaatgctactttactagttagagatttatcctcattttagtctcccccaccaactgccacaatatgtaagatttattgagatgtcccatgatagaattagcctcgctttctgagggcattcactctagagtaaacctctgcttcctgaaacccaccttcaggttattcaaccagagcctaaatcctgggtaggttctttacagcactctcttactaggacaccctgtggttccccatgctgcgtgatctccctcactgccacaagtaataaacccacctagttcaacgataggtgtgtttctgatggactttggctgggaggtgttgatactagtaaggataattttagtgagaaattgatcagcctgtgtgtgtgtgtttgtgtgtgtgtgtaagtgtgtaagtcagagtatatgtatagctcatgatctgacttttgaaaacaattaaagagttctaaaaatgcttagccctctaaacatgcttagtaatcttagattgtttttcccagtaggcacttttgaaagacagtattgttttatatatatatctttgaaagacagtattattatatatataacatactgttatatatatataataacctcctttttatatatatatttacatgtaaatgtttaccatatatatatgtatatatagtcgaaaagcagcctgtaaacatttgttcagccccttaaaaatttaatgatagattccaatgccctattctaaataaagtgtagtgagatccttaaaactactaaagggaagttattgcctagtcatttaaaaagacctgttaaatgtgatttcctgttaaatgcgattggatgttgagtttaaatatttgacatgcagagctgtgtttcaggattactatatggcaattagatactgtagttaataactttaggtttgtatcattctaacagggtaattttgaatcttatatcttaggtttttagggcataaagttgacctgagctgtggcactrttctttgagttggttactgccctttgaatcaccagtttatctttgtcttttgtctatataccgtttatttttttatttttatttttttaccttattgtgctggctcagagctccagtaacatgttgaatagagatgatgggagcagtcagccttgccttaatcccaaaattaggggaacaaacattcagccttctcccattattacatacgaaggtacgattttcagaggtgttctttgtaagcttgaggacattcctttctattgctagttttctgaaagttttatcggaatggatgttgaattttgtcaaatgcttttcccacatctattgagatgatcatatggtttttcttctttattctgttaatgtggtgaattacactgattcctttttcaagtgttaaacctatcctgtattcttgttacaaaccccagttatgatatgcttatatgctgctggattcaatttaatatttatgcgcatatcaacagtgtgtgtggaaaactttttatttaatgaaaatattctttaaaatgtatattatgagtgtataacttgatgaattttcacagctaacacacttgtgtaactaacaccttgctcaagtaacattaccagcatctggaaggccccttcaactcccccccacattcactacttccctaacccacatgagtaaccactaacctggtttctaacaggatagattagttttgcctgttttaatactgcatataaatggaatcttactatatacattattttgcatttggcttctttctgtcaacattatgtgtgaaattcatccttcttgcgttttcagcaaacttttgttttcaaagtttaagtgtattttttatttttattttatttattttttgagatggagtcttgctctgtcacccagtctggaatgcagtggcacgatctcggctcactgcaacctctgcctcgtaggttcaagcagttctcttgcctcagcttcctgaatagctgggactgtagatgcgtgccaccacacccagctaattttttttttttttttttttgtatttttagtggagacagggttttgccatgttagccaggctggtctcaaactcctgacctcaagtgatccacctgcctcggcctcccaaaatgctaggattacaggcgtgagccactgcgccaggtctaaatgtactttttaaaactaaggttatttcctcatctcattctgaaggttttttattctgtctaaaaaatattttcattgagaaaagggaagtgcaacttggtacttgaagtttaaaattaccttagattttacttttgacccttgaggtaactttcagttaacatggcagaaaacactttaaaaaaaaatagactttattttttagagcagttttaagtttacagcagaagagaaaacacttttttttttttttttggagacagtctcattctgtcactcacactggggtgcagtggtgccatcatggctcattgcagcctgggcttaagggatcctcccacttcagcctcctgagtagctcggactgcaggcacgtgccactacacttggctaatttttaaattttttttgcagagacggagtctccctatgttgcccaagcgggccttccactctgggctcaagtgatccttccaccttggcctcccaaagtgtggaggttacagatgtgagtcatggcatccagcccagaaaagcacttttgacattcaaaagctatggaaggccgagcaccatggctcattcctgtaatcccctagcactttgggaggccggagtgggaggatcacttgaagccaggagtttaagaccagcctgggcaacaaagtgagaccccccctctacccccgtctctacaaaaattttaaaaatcaactggatatgctggcattcatctgtagtcccagctgctcaggaggtggaagcaggaggatcacttgggtccaagagtttgaagttacagtgagctgaccgcaccactgcactccagcctgggtgacagagtgagacttcgtctaaaaaaaaaaaaagaaaaaacacaaaagtctgtcttgagtcctctgtaattttgactgggtgtggtggctcatgcctgcgatcccagctacttgggaggctgaggcgggaggattgcttgagccttaggagttcaagaccagcctgggcaaccctgtctctttaaaaaaaaaaaaaaaaaaaaactatggaaaattatagcctgtcctttctgtgattatagtggatttttaaggatagttgttataaaatacatatgtaacagttatttcatgaatataggaataggacaatatattcaatagttatcttggaagataacattctttttttttttttttttttttgagacggagtctcgctctgtcgcccaggccggactgcggactgcagtggcgcaatctcggctcactgcaagctccgcttcccgggttcacgccattctcctgcctcagcctcccgagtagctgggactacaggcgcccgccaccgcgcccggctaattttttgtatttttagtagagacagggtttcaccttgttagccargatggtctcgatctcctgacctcatgatccacccgcctcggcctcccaaagtgctgggattacaggcgtgagccaccgcgcccggccggaagataacattctttaatgtcccargtttatatttgggatctgctttctattccttgtcctttaggagaaagtgttattggtggggatagtactttagaaaccagatttcgaggggaaaaaaattctagaattaaatgggttaatccttcacccaatgttagctgcttttgtcaagctttatgtctctcccctttaaaagagggagatgttatgctgattttgttacatgattccacattattactttactagtaaaatatttggggaaaagaaaggtgtataatcctacattatacacaaataatcatacattatttactagcaaataatgtatgattattcgtggagtggtacaaacattaagtagattagtgattttatttataggagagtgcattaaaggacagtgacaagcaactaaagattggtgatatcatttgatctaatagttttattaagcaaagggcagaggatatgaaaatacctgtgtttttcaaggcaggtattctgttttccatttttatatattttatttatgaaataataaagtttcttaatacaattgaggcaatttagttggtgttatttaagcagagtgtaactcacagatttttaatatgttatttttaaattgtacatttctgacatagagttgatcatgtttttaaaggacccattggtggtggaactttcaaggcctggaccactgacctcagccttgttcctgtttcttcacagcatgaaggagactgaaaaaggaccactttctcctaaagttctttttaatcagctttgtcagaagygggtgcatctacatttaatataaataattatgagttacaaaatactaatgtattcatcatttaacatgaatagtcgtttttactgtaactttgctcttattgccctgactatgaagagaactaaaatttgttacagctctatgctttatgaaaattatatctcagtcctcagaagaagcagcttatcctcatatataaggaaatggagacacagaaattaaatggctcacctagtctgagtgaaaagctgagaatcaaatggagatctgtcctgacttggatgcctatgttgtaataccataaagtgagaaaaccatagagttgtaaaatctagaaagtaccgtaagataacatctaatctagctttcttattttaaaagatgagctgtgaggcaaatagagtttaagtgaatttctcaaggtattacagtatgtttaaaaaccaaatccttatgtgcctggaaataaacacataaaggatctgacttgactttaatgcattcatgtattcatttatataaaaaattgagagcttgctttttatgaggtacttgctacaattcaggggtacacaacatatattgcgtcacaaatgcaccctgtcctcatggaactcacaagctagtccagtccacaattactaaaatatgtagaaggaaaattatttgaatatgagcttgtgtttttgtatatctatagactttaaaatctcattttaattaaaactagtaatgaatgccatgatattttaaatatagtccaaaatagagggcttagtgtatgtttcatttggttggcaaatgatgtttcttcaaagcctgaggaccaaaaaaacctgcaaaattctcagaggcatgagtgtctcacagagttaaaaagtttttagcacagccataataaagaatgaaatcatattctttgcgacaacatggatgcagctggaggccattattctaagtgaattaatgcaggaacagaaaaccagataccacatgttctcataagtggaagctaaacattgggtactcatggacataaagatggcaacagtagagagtggggattactagaggtgggagagattgagggaggaagggttgaaaaactaactattgggtactatgcttagtacctgagtgacgggatcattcgtactccggacctttgcatcacacaatatacccagataacaaacctgcacatgtaccccttgaatctaaaataaaagttgaaattaaaacaaaaaaagttactaggtcattgtatgctttagaaatttgtttctgactttgccagaaataacttgttttgtatagttttcttcctggttataaaggtttattaacattttaaaaattactatyaaaataatgggcactcatagataaaaattcaaactcctctctatctttactcctcagaagtaactattatctgattctttccaaaagtgatcatacatacacagacataygcaaattttttgcaacttgcttgatatattttatacatctttccatgttagcacatgtgtgtataacttactcagttttgtatgaatacactgtacttgcggaagtacatctgtaggataaattcttagaataactagatcaaacattatttgaagagttttatgtattttttgtattttttaggagacagggtctcgctctgtgcccaggctcaagtgcagtggcccaatcatagtcgaattcctgggctcaagcatgcctccctgctcaacctcccaagtagctgggattacaggcatgagcrtcatccatgcttggctgaaaagttttaaattgccttttttttgtttgttttatggcgtttacttttaaaagaagtatacattagacaaatatatttttttaaaatcaagtaaagatttaagccacatgtgtttgggtttatttctgaactataytctgtttcattgatctacatgtcttgtctttaccccaaagcctacactgtcttgattactgtagcttcatagtaagtcttgcaattgagtagcataagttctcaaattttggtcatccttttcaaactattctaggtcctcttttttttttttgagacggagtttcgctcttgttgcccaggctggagtgcaatggtatgattttggcttaccacagcctccacctcctgggttcaagcaattctcctgcctcagcctgggattacaggcgcccgctaccacacccggctaattttgtatttttactagagatggggtttctccatgttggtcaggctggtcttgaactcccaacctcaggtgatctgcccaccttggcctcccaaagtgccagggttacaggcgtgagccacygcgcctggccggtcctttgcttttttatgtaaattatagaatcagattgtcagttgggattgttttgaatgtgtagatcaatttggggagaatcaacatcttaacaatgttgaatcttttcatgtatgatatcttaccagttttctaggtctttgatttttctcatcaagggtgtatagttttcagcatacaaatcccrcacatattttgttagatttatcttaagaatttcatgtttttatgctatttattgtaaatggtactctttttaaagaattcaatttccaattgttcattgttaatatacagaaatacagttgatttttgtatgttgaccttgtttcttgctaccctacccaacttgctttactagttctcttagctttatgttgattcgttggtatttcctatgtagacaatgtcattggcaaatgaagattgttttctttctttccaatctgtatcattttatatctttttctcattttatatcactgtcagggacaaccaatacatattgcaataggactcttcttggaaaaaaaatgaaaaaggaccaccaatacaatgttagaatggtgaaataggcatcttgccttattcctgatattaaagggagagcatgcagtctttcacacgtaagtgtgataataactatagagttttcatacatgccttttatcaggttgaggaaattcccaattattcttagtttttcttttttctgagagttcttattaagaaatggattttttaaaaatgctttttctgtatccaaataatctttttttttttttttttttgtctgttggaatagtaaattgtattggtggatattctggctagctttagtaaggtatatgtgacataaaataaattgtacatatttaaagtgtactactggggccagacacagtggctcatgcctgtaatcccagcagtttgggagccaaggtgggagaactgcctgaggccaggagtttgagactagccaggacaacatagggagactctatgaaaaaaaaattagccagaggtgtgatggtgcacacctgtagtcccagctactctagaggctgaggtaggaggatcacttgagcctaggagttttgagtgttcagtgagctgttaatgtcattgcactcctgtcacccctgtctctctaaaaaataaaatataggataagttttgacatatctatacactttgtgtatgtgtgtgtgtgtgtgtgtgtatatatgtatatatacatacattcattcaatgtaatgaatgtatccatcaccccccaaagttttgttgggcccctttataatccctttctctagaacctctcccctaaactccatccctgggtggtataccccttacctgttttttttkttkttgttgcaatagattagtttgcattttggggaattctatagaaatggaatcatacagggtgtactctttttttatctgacttccttcacttggcataatttgtggtttattcatattgtgtgtacatgaaccagtctcttgaagtttctgttatagtggtgattatcacacactttgaccacttgtgatgagccttatttgggagcaaggtcttcaactttgtggtttttgtttgttttatttggttttctgcttctgcattagttcacttagggtgatggctttcagctgcttccatgttgcttgctgcaaaggatatgattttgttcttttttatggctgtgtagtattccatggtgtatatggaccacattttctttatccaatccaccatatatgggcacctaggttgattccatgtctttgctattgtgaatagcactgtgatgaacatagaagtggattaaatttctttttcttgacagtctcctaatttatgcttgtacatatatttttctctcatgccttgaggtttttaaaagtcctctcctctttctcatggcaatacttttactaaagtacatttcctgggaatccttagggttccccttattttgaataggctgaatattttcatatgtttggtgatttttatcttttaatcctttaataggtttgaaagtctctcttgatatgggtagctcagataggctccatcrtagagtctagaaatcatcctatgatttttttttgcccattcctaggttaaaaaaaaaaaaaaaaaaaacaaatctaagtttattaaattttcttcagkggtttagaaggcagtaaatagtttttgcattggttgagaaggagctataggcagagacatggtggaggcagtttctctttgttcaggaatgatttcctccttgtgtgtctgctttgaaagccataaactgccccctcctcctacctaccacttggctagtgaagatctctgagggattctcctgttccctcctctagtcatctgctacttcactggccttccttggagtatacagcataagtatagggttctgcagtttctgcctctcctgatgccagctgtggaggtccaaatargattagaatatgtgtccatcttggtttctgtcctcatctctaatctaggaggtgggttctgtccaccaagtgcaggtagggaagcccatcaaggtaataaagtattgtcagcatgttgctatgtgctgctagttagcaagaatgtctggagtggtgtttcctcttacaggctggattgatgaccggttaatgttttagcagtcagggactcacttyctttgtattattaggattaatatttatcctgagataatgaagaataatgctgaaagtactgcacttggccgggcgtgatggctcatgcctgtaattccagcactttgagaggctgaggtgggtggatcatttgaggtcaggagttcgagaccagcctgaccaacatggagaaaccccacctctactaaaaatacaaaaattagccgggcacgatggcaggtgtggccagcaactgtagtcccagccactcaggaggctgaggcaggagaattgcttgaacccaggaggcggaggttgcagtgagctgagattgtgccactgcactccagcctaggtgacagagtgaaactccatctcacaaaaataaaaatgagataataattaaaaataattaagtactgcactctgtcaaaagacctgtagttatgttagtggcacttagcttgttcttcgattttctcaagcataaagtagaacttatattaattataaattcctgaacagtgctgttttgtatatcacatgagatatgttgtaaatatcataaatagttgtaaatgtgtcttctactataatatattctaattattttgtattttgacagaattatttcttcatcttaggtctgaacactttctagatttaatacttgtctgcacttaaggcaaaatgttcattttagcatagagtttactgtaggttactttttaaagttactgaaatcaaccaaatatttcctatgtcagtgtctccatgaatagtacctgatctttctattaagttaatacagaggaaatttaattatcaagtccttaaaaaacatattcacagggagatcaacttatagtcctttatatgaaatagaaacactctcttgctttccttttggttaaggtaggaagataataaatcacagtggcttgggtttgaatactggtttatttgctagctgtatgaccttgcaaatgatttaaacaatactgctgagtcctcatgtgtaagttggagaaaacagtacatcccaacaaagttgttggaggattatgcctgaacatgtgaaaaactactagtattgtgcttaacatatagtagttgcttaataaatgatagccatattctcagtgcacacttaagatcacaccctaattggaccagtaatcacatttcatctatttagttggaaaagtagtaaactgtgtctttatgccattttgtgtgtgtgggtgtgtgttttggtagagaacggggttttgccttgttgcccaggctggtctcgaactcctgagctcaagtgatctgccccttggcctcccaaatgctgggattacaggcgtaggctgccgcacccagctaataatatgctatttcaagtgcatttagagaagagtgttgatgaaccatggaatgattattctttttttctttcctcttttgtttttaaatcacagggcacctcgatttaaagatttccagcaacaggacagtcaggagcttcttcattatcttctggatgcagtgaggacagaagaaacaaaggtcaggtttctttatgtatatcatgtattctcttcaagaagaggatacaaaactaagggattattggggggccaaggcggggtggatcatctgaggtcaggagtttcagaccagcctagmcaacatagtgaaacctcgtctctaataaaaattagccgcgcatggtggtgcatacctgtaattccagctacttggcaggctgagacatgagaattgcttgaacccaggaagcagaggttgcagtgagcggagatcccgctactgcactactccagcctgggtgacagagtgagactctgtctcaaaaaacaarcaaacaaaaaacaactaagtaagtaatttctattacaatttaaaagtacagttgagaaataatttaattttttagagtaaatattctagatattttttctttcttctgtaagatatttacctttatccttttacagccctattgtcctttttagttaatgtcctttggctgtaaataaaataatttaaactagcttaagtaaaaaggaattggggccaggcatggtggctcatgcctgtaatcccaacactttggaaggctgaggcaggtggatcacctgaggtcaggagttcaagatcagcctgggaaacatgctgaaaccctgtctctactaaaaatacaaaaattagccaggtgtggtagcgtgtgcctgtaatcctagctacttgggaggctgaggcaggagaatacttgaaccccaagggtggagkttgcagtgagccgagatcgtgccactgcactccagcctgggtgacggagtgaaacgctgtaaaaaaaaaaaaaaaaaaaggaatcttaagatgcagggagatattattcctgggcgatagggggatataggaacaggaaagctgtcaggaatccagaaagcattcttcttattatcctagtttctctggctctgtaaattttcttcatttttctccatgcagaccaagcagtatttgtatgtcatagttccatgtatgtaaaaactatactggctattcatgattctcaatttttaaattcccagtagacagaaacttcattattccatgttggattaaattccactcatggatcagttgtttgtggctaggagagaggagtcccagcctcttagatgagagagcatttctcagaaaaggaatagcctgtggactggatagattccccagtgttgattgtaggcctatcccctaactgataggctctttattgactttaacgttaaattagttaaattcaacttcttctgggaggggtttcctgtgcacataggatcagtttatcagagaaaatgcaagatattaaggatatcagatacacagcacacattctccattttcctccctcttactcatagaagacattgctgatcgttcctaacagtccaggtgagtttgggttcagcctcagaattattttctgagcacaccattgtgggcagcccttgtcagtcataattggagtaataggtgaaaacctgttttccattcaaggcaaatatacttcttaatctatrtggtaatatgtaataaaagcagccaagtgttcagtgaagtgcatatgtgcttgtgataagtagtgctaggcaagatggaccttccttttttaaaaaaaattctgccagatatggtggctcatgcctgtaatcccagcactctgggaggccaaggtgggcggatcacttgagctcaggaatttcagaccagcctggccaatatagtgaaaccatgtgtctactaaaaacacaaaaattagccaggcgtggtggtgcacacctgtaatcccagcttcttgggtggctgaggcatgagaattgcttgaacccgagaggcrgaggttgcagtgagctgtgatcgcaccactgcactccagcctgggcaacagagcagagcctacctcaaaaaacaacaaaaatcctgttttaattgtagtgtggcagtgtctctttactcctagtgaccagtttccagtgaagagaaaattagagttctaatattttctttaaagtttcctttaaaagtaaggattgagttaattactctctcctgctataaaacatcatgtatcacaatcctatttttaattgtctgtttattgactttcttattaagctaattgaattcagcttttagaggtgtcattccttttctgccacctctctacttttacrtatttgatcataaaccctaccactttctatttagatttatgtccctatctgtcagctttcttagattgtgatctctttgaggaatggtactatgtattgtctctgtcctgtgtgccttgcacatagtagatgttctgtgaatttgtgtgtgtgtgtgtgtgtgtgtgttttgttttttttgttttttttttgagacagggtctcactctgtcatccaggctggagtgcagtggcatgatctcagctcactgcagcctctgcctcccaggttcaagtgattctcctgcctcagcctcccgagtagctgggattacagggtgtgccaccattcccagctaatttttgtacttttagtagaaatggggtttcaccatgttgactaggcttgcttatttatttagacagtgtcttgctctgttgcttaggctgcagtgcagtgttgtgatctcggctcactgcaacctccaacctcctgggttcaagtgattctcctgcctcagcctcctgaatagctgggattacagacacatatcaccaagcctggctaattttttttttttttcgtatttttagtagagacagggttttaccactttggccaggcttgtttcgaactccggacctcaagtaatctgcctgcctcggcctcccaaagtgctgggatcacaggcatgagctgccactcygggctccctgtgaatgttttttgaatgagttgtatgtgcttaaccttaaacgcaacttttttttgagaatttgaattgggaagaaatcaaaataattattcttatatgttatactagctagtttctttgtgatttgcaattattttgaatatgttgtatttgaataaactaataaaccgacaggatratactgtgttgttttacctacattgtgtctaaaaaagaaaaaaaaaaagagatttataattagttaaccattgaggatattagcgtagtcccctagctagtatttgatcacattttcttagagctaggaactgatacttagagttgagcttcaaactcaagtctttctgactcccaaactaatgatctttctaattctataaaatactgctgattgaagtttaaatgcttggacatctgtagtcagtagaaataatgattttaagtctgctatttaaaatgtaaccacaattattttactatttgtaaaagtattaaattggattcaataattatggtatattgctcttcttgttgaggggtagatgcatgttggcacggtgggaacaggttgctttttgtattgtgaacaataaatgggcctacagatgatatgagttactttaagattaattcagatttatcaattgctagaattatttttttccccatgatttgcaggaatacgtttactatgtggtggtcatgtatcattaaatggaattaaaaattatgtaagtgggctgggcatggtggctcattcctgtaatcccagcagtttgggaggctgaggtgggcagatcgcctgaggtcaggagttcgagaccagcttggccaacatggtgaaaccccgtgtctactaaaaatacaaaaattagccaagcatggtgatgcgtgtctgtaatcctggctactcaggagactgaggcaggagagttgcttgaactcgaggtggaggttgcagtgagctgtgatcgcggcactgcactctagactgggtgagggartgagacaygttctcaaaaaaaaaaaaaaaattagtaagtgaagttaaaagtcatgtgaatggattaaaattatgtcttggggttttttttctgttgatattatwaaaaaagtaaaatatatccctgtcacttttttctgttttacctctataatttgatagcagtctttgttataattaaattattgtttagtcgtaatggtgcattgggatgcacagtatcttaggcagcccagcaggacacattggttttgaaagctcttatctttcttgcactatttgaaggctttaaatggtgcagtaaaattaaaatgtcaagtctgtggatctattcaatttcataagcgaggacagtcctgacggtcagctacagtatcagggcaggagctgcattgtctggcctgggaactccacagctgttaatcatgctgttgttgtagggtgtcactgccatgtgtttcttgattgaaggaaggctacagtgttatgtctgccaccagaatcttttagtaatgatgaaaaactactgacctcctttcatatggtttcattaaagtcttttctgaactacaacattgaggaatatactcttgctgaatatagtacttaaaggatcatttgtgcagaaattgtaaatttttcatgtacaaaatcaaatttcctagaagtagttcttttataaggcagtctttttaatttatacatttatgcttctttgttttttccttttaatttgcacagtcactaaattaatgatactatatttttattatcttcaagatttattactgtaatatatttttggttagaattattttaaagacagaatatctcagctaaaactgtacattattttcattcttgtttttaaagtataaggtggagatctgaaatagttgaaccttgatactgctaattgattaagtgctacagttattaacagctccctgaccaaagtatgtatctttcttttaacctaaattgttcaaagcacaactcttaacaatgaggaattgtatatggacgtaaactcatttattttcctcaacttgatgaattacctattaattgacttttaaacagtttggagtagagaatataaattcacggttaggatcaaaattaaaaagcaaaagtctaatatttaaaagttaataatgtaaacaatttcattttactctttttagagtgtaatcacagctttttagcttttttcctgctgcttgaattggtaacttcttagcttcttttgagtgatatgacatttcaggatatatagcaaagtttcattaaatcatatcaaaaatcatgtctgaattagtaaaatgtttaaattgtaggataaatttacagactgagttgagttagaagtatttctcttgagttgtttgaaatgttatgattatctgaaatatttgcgagtgaacattggtatttattggaatttttcatttaagttcattaaatayttctcctgcatggaatttacacaattccaatttgcttactttagttcaataaattcttttttcaaggtgtaaaagccaactttagcttagacaatgtctgaattatatcaactttcaaatttattgagtctgaattggagattatttcagtatttaatagcttctgggagacattttattgtttgatttctttatagtatataagtgtatttcaggacttgtgtcacacggtatgaattgctttatgtttgcttttatcccctactttgtaaaatatttaagtgttttgaatcttgtattaattttcaaaatatgcttgaggacagtgaacagttataggaaatataatgtgttaatcacaggccagttagtaataagtgaaactcggtttcacaattgttggaggaggatgtgttaaaaaacatatatcatacacagaagaaacataaatcatacacagcagaacaattctgggggtcatgagtgtcttctgcttatccaggcagcagggcatggagcgagaataagaatgtgatcacctccttctccatataatattgtgttcttagattaaaagcatgttataatggcagaaggggatgttggtgttgacaatatttctgattcataagtctcattgctccaatctgggttctttayctctcatatctgatgtacaggtgtcactctggaattcctcctaaccatgctcctgggagatccctttgcctctcttgtgttttgactttgccattgtttatatcccgtgttcttgtctttcttcctttatgctctttttttccttattcaaaaggtggcatataccatatatataacttgtactttgtcttttttcacttaatatatcatagtgatcttttccaattaaaagataggaaggaccaggcaccacctgtaatcccagcactttgggagtttgagaccagcctgggcaacataggaagagcctgtctctacaaaacgaacaaacaaacaacaaaaaacaggtgtggcagctcatgcctgtaattccagcactttgggaggctgaggcaggtggcttgcttgagctcagaagctcaaggccagcctgggcaatatggcaaaaccccatctctacaaaaaaatttttaaaaattagccaggtgtcatggtgtgtgcctatagtcccaggtacttgggaggctgaggcagtaggatcacttgaacccagagaagtcaaagctgcagtgggcagtgattacaccactgcactccagcctgggcaacaaaacaagactctcaaaaawatatatatatatatatatattatatatatattaattatatatatattttttggaaagataattaaacttttccctcatcctactgtcataatctgaattaggaagacaaaattcatccactaattaggggcatagttaatgttaaaaggtcacttactaagttttattcttggagtatgtagttttattctgaaacttttctgtgagattggatctttcctaaaacatacacaagagatgtagaaatagttaatataaaccttgtcatttactgagagctgctgaaaacataatcattattgacaactaagttcaagtaaaaccataattaaaatttgggggattcttcttgctatggacattaattgataaatttggactttagttatatgtgtatataaatgaggtagtccacatagcatagagattatagtaaccagcttgatagcttcttaatatagaaaggtcttcatagacaataaatttcatatggtctattttcttttttggtcctaattaagaagtgtcattttagagagagggagaaggaagaaagagggcaaattaayttatgytaagcaacaggactaggctgcttgctttttgtacactgataaaaatacattaaatccaagagagaacctaaatgtaaaaattctgactcttacttgggaaaatttgacattagagcaatctattcatggaatttgagacctggaagaaattacattttttaaaaaatttggtcattttawtttcaaactagggaactgaaatccacagtgtaccttgctgtttgaaagtacttttattaggagsatgaggcctgagttaactattattagaccagaatctattaactttgktttacagcgaatacaagctagcattctaaaagcatttaacaacccaactactaaaactgctgatgatgaaactagaaaaaaagtcaaaggtatgttgactctttgttaaaacttttttctttaagaaaatattaaaattttattttagttggaaaaagaactgaacattatgtgaactaatccaccaaagtagtggctttaaaaggaggacgtagttgctgcagtgtctgaaaaatactttagtggaacatagaaaatgctagaatgtattcatgtgaatttataagaataaagctataccaagtatacagattgacacyratacctttatgtgaggtcttctaagggaaacttgaaaggttgttgaaagtagcaaccacacttggaagttcatatgtatcatattgtatcatttgacatgtgtttggatcaatggatttatggatattttttagatgtaactagacaaaatgtttaagtgctccaaagactcctgcaaataaaccgtttattgaagagagtgctggtaagtcaagtgtaagtgcactttgcctactcctagtgtttgctattcatccataaaaatatgagccccaaatgatgattacctaatcaaagttggttatttatcattatcaatactatatagggtttatataccttgccctaaatgtatattctgcattgagatactaactaatgttagcatgaagtgatttttagaagacatttaaaaatattatttgtatttttttctaacttttgtttttgtggttttataatgtatgtactacaggtctataatttgcaaacatacacacattgttactgtgcactttaytgtaattaagggttcaagatttttaaaaaacgtagctgctcaaatatgccttgttcttttgtgttgagatagtgccatctcgtggatgtttagaataacagccccgtttttcttccccctctttccagttttgtactatttccaatcccttttagtttttctagaagaaatatctttattattatagtatttctaaatacaattttaattaatgtttactgatatattcacatgttttctgtcattcagtgctctaatattttaaatgattttgaatattgtttgtatgaaacttgaagatagaggctcaaaaaagaagtttgaaagaggggtgaataggtttgttaatatactttttcctcccatggtttatgatggaaagtttcaaatttttattaaagtagagagaatagcataatgcagccctttatatctgtcacccaacttaaactgcgttcatggtttatgtttaatccattttstcccaacctcaggttattttaaactaagtcattggcatttttttaatttataaatatttcctgagcagaataattttaacttttaaaaatataaccatgttcttgagttcttaattacctatgttaattccttacacttgccttttacgactgttattttcatagccgtgatcctggcatccgtagtcctgatagcataatctccttttccattcttctgggtacttattggttagacatgaggttttataagttttaatgggagtggttgaggtgtggtacgaatagtggttgttttgttttacctcttaagaatagttcattatttcttggagactaaagtagttgatagtcgtaaatctgctacaaaattgtaaaggagaaagactttagaatgttgtatgtatagtaaaatgtattattaaatgtagtacagaatatcttattcagattacttttgaataaccagaagatagcctattatactgctagatggatggttgacatgttttttgcattaaaaagtatgatttttacagcatatggaaaagaaggtgtgaaaatgaacttcatagatcggatctttattggtgaattaactagcacggtcatgtgtgaagaatgtgcaaatgtaggtactttagaattcaattcagcatggaatggattacaatcacatcatttttattatattttctttcacatataatcattggcagtcatttttaaaatttgacagatgattacataatgattcttgaaagtctttttatacgctacactcctagaaagtaaatgtgataatttatatatttttaaaagtaaatgtatttttgtgttatttttcctcatgacacacctatgaggcagttttagcctatcttaatatactgaaattcattagctatctgtttgaagtgagagaaaaacttctgtgaagagagtaactgtgctacgttgcagtgccctaaaatgtaattccaggctgggtgcagtggctcatgcctataatcccagtactttgggaggccaaggccggcggatcacttgaggtcaggaattcaagactagcctggccaacatggtgaaaccccatctctactaaaaaaatacaaaacaattagccaggcatggtggtgggtgcctatagtcccaatgactcgggaggctgaggcaggagaatcacttgaacccagcaggcagggttgcagtgagcygagatcgcactactgcactatagcctgggtgacagagcgagactcagtttcaaaaaaaaaaaactaattccaatagaaataacttaatgtattaacataatttagggtggttatatcacctttgatttaaagtttatatgacgtattaaagatttttgtgtagacttcactcactttgaacttaataatttttattttgaatgccatctttaacaacttaaagcatgtatgaattttttgtagattttcaattgcttggcaaggaatatttctgtaagtgtatgacttagagtatgataggtttaaatttctgttagattttaatagtaaaaggagcctttattcattttcctgtcccagattatgagtatttttctgtgttctctagccttaaagaagcaggattataaaatatatctcattctagcctgtcacattgaaacacagaatgcatgaccatgattatttaagtttctagactattcaacacagaagttgttttctctctcacaagatagagagtatcttttaaaacaaaattatcttaaagaatctataaaacacagccaagctctctgctttttttcatggctttttcttaacatttcatagtttacttatgttacagccctaagctaaccaaaaatgtctagtctctttagttaatctgttttattaaacagtttttttaagttattttaaatattacaggccagtcatattgacagtaatataaaattcaagtggatcacattcactgatgtttgagaatatcttgttttgattaacaatgtgctgcaatacccaattaaattgctatttttttcaggaacagtttttaacgtaaaattttaggttgcccgggaagtttgatttctttgtactttacaaaactgtatgtttatattagaattctaactgaagttttcaatgtgttttccttttaagatctccacggtgaaagatccattcattgatatttcacttcctataatagaagaaagggtaaggagaagaaaactaatgatgaagctttggtgaagaacatttaatcatttatttaaacatttgttgagtatattaccagatatctgagagtcattattttttatatataattgagtttgtattcataattgagtctgatttgggggtttgtgtaagtatgcataaagtatgatggtttttattctcaaggaatttaaactcttaaacactttttattttgataatttgttaattttttgtatttcaagtcagtcaaaaattttaagatgaggacatccagaatttatttactaaagaggttttggtttctgtatgtggcatttacataggtttcaaaacctttactttggggaagaatgaataaatatagaagtttacgggagacagatcatgatcgatacagtggcaatgttactatagaaaatattcatcaacctagagctgccaagaagcattcttcatctaaagataaggtaagaccataagcatctgttagacgtctgttttttaacagtttattaacaaaagtttcaagcacatctaaaagtagagaacatagtgtaataaactctcatgtacccattttttggcttcataattatcaacttggctacttgtatactmactatatatatcccacatcctccccttcctcccatcccagactatttttggataatcccagattatttttgaaataaatcccaaatatatcatatacttcaatgtgtatctctacaagagagtttttgtttgtttgtttgttttttaagacggagttttgctcttgttgcctaggctggagtgcaatggtgcaatctcagctaactgcagcctccgcctcctgggttcaagcgattctcctgcctcagcctcctgagtagctgggattacaggcatgtgccaccacgcctggctaattttgtatttttaatagagacggggtttcaccatgttggtcaggctggtctcgaactcctgacctcaggtgatctgcccgcctcggcctcccaaagcgctgggattacaggagtgagccactgcgcccagcactaaccgagggatactcttaaaaaccaaaaaccacagtaccattatcatatcaaaaatattaattcattataaataaataaggattcagtcattatttaaatttctgcagttgtctcataagtacttagttttttattttgctttctaaagtttggattttaggatttaaaagaggtctatggattgcagtgcctcttttttttttttttttttgagatggagtctcgctctgttgcccaggtggcgcgatcttggctcactgcaacctctgcctcctgggttcaagcgattctcctgcctcagcctcctgagtagctgggagtacaggcgcatgtcaccacaccyggytaatttttgtatttttagtagagaccaggtttcaccatgttggtcaggctggtctcgaaatcctgacctcatgatccasycgcctcagcctcccaatgattgccatgtctcttaaatctcttttcatctacagattccctctccctctttttcctcctttgcagtttatttgctgaagaaatcaggtcctttttttcagcagcatggtgttaacagattcctctgtcacctttatttctcctctgagacatttagatctagaggcctagttaggttcagatttaattacttatttaatttttagcaagaaaacttttaggtggtggcatgtatacttccatcagctagatgcacataatgttttatgtctctctatgatattaccagtcactgataaccattgtctagatctattatkttactagggacatacctggttgttgaattatcccatgaaaatggaaaattattccatgaaatggtgatcattgtaaccattgtctagacctattatttcactagggacatacctggctgttgtattatcccatgaaaatggaaagaaatcaatctgaacttatacttcagcaaaaaaaacttttttatatgaaatgatttgtattaatttggcaaattaatattaaatttaacttactctattaattaattaattaattaattattgagacagagtctcacrctgttgcccagccaggctggagtgcagtggcacgatctcagctcactgcagcctcccaggttcaagtgattcttgtgcctcagcctcccaagtagctgggactacatgtgcrcaccaccatgcccggctaatttttgttattttttgtagagatagggttttgtcatgttggctgggctggtctcaaactcctgatgacctcaagtgatctacctgccttggtctcccaaagtgctggaattgcaggtgtgagccacagcgctgggcctgaatttaacttactctgttagaagacttatgttagaagtcacaagacttcagaaaggacaacatgttttctataaataaaagctaattttgcttcataagatatataggacagttaaattcaatttgagcatatgctttattctaatggtataaaacaaagcatcttacagagtttgaaaaggttaaagcattaattgtgttgctattcccctaaaaagcactggttattaaaatataaatgtgtagtgattttttttctttatttttatttagtttaaagagttaggagattctgtggtactggccaaagtagttttaatacatccgctatccaaatgtatgagagaaatactttccacacagtattggttaggaactgagaatatgcatatatgatatatagaaactgtacctcaaagatctggacaccacatggatataacttgtgcttgtgctgaacaaattggacctactctttattgaaaatttttttcatataatattttttgttacttttttattggacctattctttattgaacgtttttttcatgtaatagagttaccttttttttggttttgatgggaaaaagtgcaagtttgcatacggttctaaaattagaaaagtacagttctaataacatctttaaggtactatattcaagaagcgaaaatttaaatgacataaatgtatttcagtcattaggaagtttacgtttagaagttatttccaatagttcaactacagaaccagtttaatcatggaaccagaatgattcagtagttaactactttcagtactagttttataaagatcaataaagtcttgttttgctgattagtgaagctgttaataagagtataaagatatttgtgacaaactttatagtattttttaatctcttacagtaatagaagcaccttgcatcttttaaaattatactagaggcacaagtactgatttgatcataagtttttgagttttttaccttttctgtttgccaaattatatgagttatctcattaaaaccacacaaaaacttaatatgaagaatgataaaaataattacataaaaatagtgaaattagctgagaaaatcttgccctcaagttggaagatgttatctctgagtaccttgaaaaagtgcattttcttttgcttactgataacaggcaaataatccagttaaataaagcactgtaaaactagtgtgtgcaatttctggcctaaatacagaaaaaatagtaacaggaggcagatacgtaaacagagtaaatagccataggcctatataaacatccttcttgaaccaaaaactaaggtaaaatgagctgcaacaaatggctaccaaaagatattatgtgaagtctattccataggctatttttcttcccttctttcccctccccacagctttttaaaaaaccatcatgctgattgaataattgtagagactggaaaatctcaaattgatatccttatataaaatcctgcctcagctcattagttcagaaagaaatccaaaagttcagttctctgagttgcttcaacacataagtatattagttttatgaaagattttttttttatttcataaaaccttaatacttctgccagaatcagaagtgcattgtgctctggtacaatttacatgaactttggttcccaccacctgttagctgcgcagcgttttgccaattaagctctttgagactcagctcttaaattcaattataagaccagaatcttgctgttttttctatacatcccatctgttgtttatttctgtttctacttttcatgcacttttggttttaattgaataatttttgtgttccatcttatttcctctgttttctttttagttattataaaaggtgttattatggaattgctgaaacctgtgttgtgcctctcatcattggggttatattcagaaaatcatagtcctcttatttacatggaagaaattaagaaaatttcaatctttctattattttaccaatcagaccagtcaccaaaagaatactgtgtagttacggtatctatcaatatacttcaaaatagatttgaggaaaacgctgtattcgaagggatcttacctgattttaccatttttcctaggtgctaaattgctcaaggtattatacagagatatttgagaaaatggcaacttaacctatgtaaatttttttaaggataaaattgaacaggtacttagtagttttaaagtccaagtaaaacagttgcaaggatatttttgtttatcatgtggtgttggctcaatttactcttgggaattttggaaacacccagagaaggtcatatatctcccctttgatcattttcatttcttatatttttaaactttaaaagtgggcttttcccctctacttagtgtctgtaacaaaaagagaagctccttgcatcttttaataatagaggtacaagtactgatttgatagtaaattgagtttttcacttctctttgctaaattatactacagttatctcattaaaactgaacaaagtttaatatgaaggatgataagcatcaggtgaggaaaaaaggagaaataaaaccaagatatggtaatgtgaatacaaatgaaagttagcactggtggaaaggcaacagatctggcctgagtattttagaaagtttaaaaaatagtgaaaggaaacagtgaatagaaattttttattggaaaattatgtgaggcaaaaaaagcactacccaaaaggtctgagggaaaagatagggaattatcatgtagccatctgattaattttttgtttccctagaccccactcctctccctattccccaccaccatttggtgctccacattgcagacagggcaatatttctaaaatacaaaaataggtcatcatattccttgtagccctcagaatcaagtctgatacatgcagccaacaggcatatgaaaaactcagcatcactaatcattagggaaatgcaaatcaaaagcacaatgagataccatgtcacaccagtcagaatgctattattaaaaagtcaaaaaataaatgctggcgaggctgcagagaaaaggaatgcttatactctgttggtagaagtataaattagttcaaccgttgcrgaaagcagtgtggctattcctcaaagagctaaaaacagaactaccatttgacccagcatttccattactgggtatatacctgaaggaatataaatcattctaccataaaaacacatgtaggtgaatgttcattgcagcactattcacaatagcaaagacatggaatcaacctaaatgctgatcagtgacagtttggataagaaaatgttgtacatatacaccatggaatactatgcagccataaaaaagaataagattgtgccttttacaggaacgtggatggagctggaggccattgtcgttagcaaactcacacaggaacagaaaaccaaataccacaagttctcacttataagtgggagctaaacattgagtacacttgtacacaagggaacaaagacactggggcctactggagggtgcacagggtgggaggagggagaggatcagaaaaaataatattggatactaggcttagtacctgggtgaagaaataatctgtataacaaacccctgtgacacaagtttacctttataacaaacctgcacatgtaccctgaacctaaaataaaagttgaaaaaataaatctcattgctgttcaaaacaaaaacaagtctgtgacttatatgcatctggttaatttttgtgtgtccttctcacctccccacacttgtactctattttctagctagacttccctaatttcttgttctttgtcttacctgtgggcctttgaactgtctcttctgccacgaacagtcccattctcctcctgtagcctctgctcaatttctgcatatttctctgatccactcaattctggattagttcttttcctctggctttctatagcactgtatttctcctatcataacataagttgtacctaacatttgagttcttaattatgttatgatcactgttttcagttatttacaccaattatattgagccaagaggtggattaaataacatgcctaagatcatacaagtagtctggcagaaatggggattcagacaggttaaacaaggaccatgttcttaaccacgtatactgccccctgctgacttgaacttatgtctcaccatacttttattgggatggattgcaggatctgcaaacaggaactgagtctgtccttcttgccactatgtctcaggtgcctagttcagtgcttgtacatggatggtgtttagggagaccactgagctcattctcatgattgctgccaatcgtaatagctgatactggctgggtgcggtggctcatgcctgtaatcccagcactttgggaggccgaggcaggcagatcccaaggtccggagatggagaccatcctggctaacacagtgaaaccttatctctactaaaaatgcaaaaaattagccggtcatggtggcacacgcctgtaatccagctacttgggaggttgaggcaggagaatctctggaaaccaggaggtggaggttgcagtgagccgagattgcgctactgcactccagcctgggcaacagagcgagactccatctcaaaataatactaatagtaataatagctgatacttacgctgcttactgtgggctacgcactgctctgtgggcttttctatagtctcaaaaaataaggatgggaaggggtacttttatatttcactaggagtaggaggataaaagggatagatagaatagtctcattcaaaagttcctaagaccagctgatgatgagaatcacctgtttattaaaacgaattctcatacccaacctcagacatgattaatgggaatttcttagtggtaatgcctcggatatgtatcttttaaaacaacaagccctcttaggtgagtctgataatcacctgaatttggaaactattcaatcagaattagattaattggattctggacacagctatttttattagttatatgatcttggacaagttactaaaaacctgtatgggtctatattttccattgaccattaattttctgttggtacataatatttgtacatatttatgaggtatatgtgatattttgatacatgcatagaatgtatcatgatcaagtcaggtatcggggaacctgccccaatattcacataggttcttttctattttccttaagcatcggccagcttgagaaataaagggacagagtacaaaagagagaaattctaaagctgggcgtccaggggagacatcacatgtcggtaggttacgtgatgccccacaagccgcaaaaaccagcaagtttttattagggattttcaaaaggggagggagtgtgcaaataggtgtgggtcacagacatcaagtactttacaaggtaatagaatatcacaaggcaagtggaggcagggcaagatcacaggaccacaggacagaggtgaaattaaaattgctaatgaagttttgggcaccattgtcattgataacatcttatcaggagacagggttttgagagcacccggtctgaccaaaattattaggtgggtattttcccttcctaatgagcctgggagcactatgggagactggggtctatttcatccctgcagtctcgaccataagagacggctacgcccaggggggccattcataggcctacccccaggcgcgcattctctttctcaggtatgttccttgctgagaaaaagaattcagcgatatttctcccatttgcttttgaaagaagagaaatatggctctgttccgccagctcaccagaggtcagagtttaaggttatctctcctattccctgaacaattgctgttattctgttcttttttcaaggtgcccagatttcatattgctcaaacacacatgctgtacaatttgtgcagttaacgcaattatcacatggtcctgaggcaacatacatcctcctcagctgacaggattaagagattaaagtaaagacaggcataggaaatcacaagggtattgattggggaagtgataagtgtccatgcaatctttatgatttatgttta

SEQ ID NO: 93667 - DNA, 19346 bp, Homo sapiens
  misc_feature (1)...(19346): n = A,T,C or G
gaccagtgagggacaacctgagggtggggaacataaatttgttgtggccacaatctccacaacaacccgatgtttctcctgcagcacttagcagcccaagtgaaggtaaatataagaagaagagggaacaaagatgagggagtgacgcatcctgataacgcaccaaagacaaccacaggcagaaatactgatggcagagaggcagacggggaacactgctcattgctctgcctgcctcacttttgttcaggggctaccaggaagcctgaggtcccaggtggacagaaatcaccatgatcccctcttggccccaaccaacatacacacaggaggcaaaccaacttttgatcatttattaaaacaaataagaggttaatctgtgggtaaaaaggccttgtttgccagcagctcacgggatgccttcaagctgacaggcactagtgcgccttgaagtaggaagcatcacatgggttctggagataagcaatagataaacaaccggagttaccagaagtgtcaagccaggcatcaccttaacagaaattattcctggagctaatgtggaagtcattaatcccaagagaaaagacagaggtgggcatggtggctcatgcctgtcagctcaacactttgggaggctgaagcgggaggatcccttgaagccaagagttcaagatcagcctgggcaacagagtgagacctcgtctctacaaaaactacaataaaataaattagccaggtgcagtggtgcacacctgtagtcccagctacccaggaggctaaggcaggaggattgcttgagcccaggaggtcaaggctacagtgacctatgatcacgtcactgcactccagcctgggcaacagagcaagaacctgtctctaaaaataagagaagagaagacagatgaagcaaagtgggccaaaacttagataaagggaattgctctgttttagatgaaggattgcgaaacaaaattttcaacagcagcaatgaaagacctgtctaccacagtgtagccctcagcaaaaccacaagtgggcagactctgactctcccacacccctctcactaaccccaaaccccttctagatagaatgttttccttcctcttcatcctaatgccaggagcaactttggtggtgcgttccccacatctgccctctttgccaaagccccaggttccagagccttcccttctttcttctcgactgcattaaggcttgcttaccctgagttcaagacccttacatccttgttagataaatggctgagtaagatgatcagttaatcagagcgagtatggctgatgatgccttctacaatataatgcaatgaacctgcgcccaccttcactgaacgatcaacattcactttggtgtaatggggtaaaccatcagcatgtccctcctgatgcaacgcacagagaacatgacaccattgctgtgatagtcccaccccaaatgcataagaatatcaccgccaagaaacatcagccaaatccaaagtaagggacattctatcaaataaccgtcttgcgttcttcaagaatgccaataccatgaaagataaagaaaaactgaggaggtgttccaggctaaaagggacctacagagacacaacaactgaaaataatgcatgatctgggatgatcatttgctccaatgtacatcactgggttaactggcgaaatctgaatgaggtccatatattagaaaaccgtgttgtagcagggttagtttcctgattttgatcattgccttggttatataagagaaaatccttgttattaaggaatacacaggaatatttaggggtaaaggataactcatctgccacttagaaaataataaagcaaatggggtaaaatggtagcactggggaatctcagcgaagggtataaaggatgtctttgtactattcttgcaacgcttctgtgtctggaaaaataataataaatattatatatttaataactaaatgaatgaaaaagtgtgcaatgtttctgcagatgtcaaccttggcaatgcaataggatcatctcagaagctctgcatgaatatcagtgcccaggctccaacccagagattcatagtcagttagctgggggtgaaactccagacatcggcatgtgtgaaacacaccccaaggtcattctagtgtgaatccagaataataagcagccagcttagcctttagtgtcattgggtgacaggaaagttctaggctggggactttctgagccccccatgtctgcttgttttgagatctgatcttgggggcagcatggtgactcaaaacaggagcacagttgtgggtccagtcttggtccttccactaataagatgggagactttgcgtcagatcccttgcctgtgccaagcctgggttttctcagctgtgtaatgaggttaaccaggaagtgcctcagaggccaatgtgcattcagggaagaagatgcccagctcagtaactgatatggtgtggctgtgtccccacacaaatctctaattatagttcccataatcaccacatgttgtgtgagggacctagtgggaggtaactaaatcatggggtgggtctttcccctgctgtcgtcatgacattgaataagtctcacaagatctaattctttttttctttttttgagaccgagtctcacactgttgcccaggctggagtgcagtggcatcatctcagctcactgcaacctccgcctcctggatttaagcaatttttgtgcctcagcctcccaagaatctgggacaacaggcatgagccatcacgcctggctaatttttgtatttttatcagagatgcggtttcaacatgttggccaggctggtctcaaactcctgatcttgggtgatccacccaccttggcttcccaaagtgctgtgattagagatatgagtcactgtgcccagcctgatctaatggttttataaaggggagctcccctgcacaactctcttgcctgctgccatgtaagatgtgactttgctcctcctccaccttctgccataatcatgaggcctccccagtcatgtggatctgtgagtccattaaacctctttttcttaataaattacccagtctcaggtatgtctttattagcagagtgagaatggactaatacagtaatccttaaagccccggaccccaaaatggagttgccacaggatggcagtctgaaatccttgtgatgtccagctggcagaaaggaatttggatgagtagggctggccaacttctggtattgctggtgggtcctgtcattgtgtgggtgactccttgcacccctggcccttcataggactgaaatctgggagtgttcttgggaaagggactagagaaagcaagaggacaccaatcttcttccaggcagtaggaaggcaagctggaggagccaagctcccaagtaaactgaggcacctccactggcccctttgtgaggcatgcttgacctgggttttatggaaagaatgtgccctcaccaaagggtgctaaacaaggccccaggctccacacctgatcccaggtgcccccctctgccctgccctagactcacctaaagctgtactgcccagagtcatggcctcaggccacacgtggctactggtcacttgagatgtggccatctcaattgagatatgctgttagtataaaacatacactagatttccaaggtgtcatgagcaaaaaaaaaaaaaaaagaacatagaatatctcattaagaatttttaagtattcattaatgttgaaataaaaatattttgaatatattggttaaataaagtttactaggagaattcatttcaccccttttactttttctaatgtggtgagtaaattatttaatattacacgtgtggattacattatatttctattggacagctctgttctaaagtctgcacattgtccttttgtggcttatttccttgatacttttattaaaattaaattgaggggccaggtgcagtgactcacacctgtaatctcatcattttgggaggccgaggcaggtggatcacctaaggtcaggagttcgagaccagcctggccaacatggtgaaaccctgtctctacataaaaatacaaaaattagccgggcgtacgggtgcgtgactataatcccagctacgcgggaggctgaggtaggagaatcgcttgaatcctggaggcagaagtagcagtgagccaagatcacgccactgcactccagcctgggggacaagagcaaaaatccatctctaaataaataaataaatagaaaaataaaattgagggccaggcacagtggctcatgcctgtaatcccagcactttgggaagccgaggcaggagggtgactagaggtcaggagttcgagaccagcctcgccaacatggtgaaatcccatctctactaaaaatataaaaattagctgggctttgtggtgggtgcctgaaattccagctactctggaggctgaggcaggagaatcacttgaacccaggaggcgaggttgcagtgagctgagattgcacgaagcctgggcgacagagtgagaccctgtctcaaaaaataaagaaagaaataaaaataaactgaggaaggattgagcatgcaaaatagaatcagcctttgaccctgaataccctgcagtgagaattcccctgtggttctcaggcttctgtcattccagcaaatacactcttccctcagcttcactaaaatgcagatattgtgagataatgcccatttctcacagcttgcttgaataataacaatgatcattatagtaatttacaacttaatagtcaacactgcctttttaactcagtctgtgagactgaatcgtaaacgtgacattctttaaagctgtcaattaatataccagactgcataaactctaataacttacctttccatggaaagagaatatgtgggtattctctttgaagacaaatggtggagagtagactctcatccaagaccctctggcagtaatgagttgcattccagaaggttctagaaggttctgtggaaggctgcagtttgggattggttctcaggtgtctgtctaactgctttctaaggatgaagactgccgggcgcggtggcttactcttataatcccagcactttgggaggccaagacgggcggatcacgaggtcaggagatcgagaccatccttgttaacacggtgaaacctcgtctctactaaaaatacaaaaaattagctggcatggtggtgggcgcctgtagtcccagctactccagaggctgaggaaggagaatggcatgaacccgagaggcggggcttgcagtgagccgagatcgctccactgcactccagcctgggcgacagagtgggactccgtctcaaaaaaaaaaaaaaaaaaaaaggatgaaaactcctggttcgtgctttagcaacatccacaggagcaacagactaagacattcctccacacaataacagacccaggcagtgcagagccatgtgggtcttatctgtccttttgtccacagtctggttttatcttagacctagcctggtgcaatcgatgctgcgtataggcactccacttaagtttcctgtttgtaaaaagcccctttcattcggtgattcctcagggctttaggggaactttctggaaaccaggaagaaggaaataaaggttgttttactgaggatgggtgacattgggtgcaggacccaaatgagtggtttgagcagaaagtagcctccacactggactaatgcttggcaacattatgggaaaatttggggaagccgggagaggagggggcagagtttctttcccagccagccagggggtccaggcagttttggtcctaggatgtctctctgtgcattcccaagtgattgcaaggcttcttcttgtcatcgtctgagacttggattccccaagcgtccttcttttcctggagcctctgagtcctctattcctgaggcctttcttcagccctcccaatagtcctgccatgatttcattgcagggctgtgaccatctatgacaagccggcrtctttctttaaagagacacctctggacctgcagcaccggctcttcatgaagctgggcggcacgcactctccgttcagggcccggtaggcctcccatcctcagctgccttctctcctgctcaccactgtcctggcctctcccgttctcactgcagacctgggaacccactcatccaggggttggcacactaaggctacaggccagtctcctgcttttgtaagtcaagtttcattgggacacaacacactcattgccttctgagttgtctayagccgcctttgagctacaatagcagaatcrcgttttgcaacagagaacccgtggcctgcaaagcctgaagtatttactctctggccctttaagaaatgtttgtggacccctgcgctatcttactctcctgccagtgggttcccaggcctgtggcaggatctgtggacctgtgtgtcccctggggtgtctcacgtggttaaggaggggacctttgtgcagatccacacaccctaagctgtgcccctgggtaagttggggtggtgtgggagggagtccctgcaccctcatattgagtccaggggatgataagacagtaagtcccatggagaaaaggaatgagtcagtcttgtttgctgttgtaaccttagcacccagcaacaatattagagaaagcaagcccaggcctcggatggcaggggtggcctggtgctgctgatgtggccgggcaycccaacctttgggagcctgcaggccttgccacggcaggagatgcccgtcctgggtcctgggcctgctctgtggcctctcacaggcttttttcctgctctttcagttcagaacctgaggaaccagccacagagccgtcggccttcatggagtgggatgctgggagcgggctggtgatgcttctccgcgagcwgccagccctgctggtcagcagcacaggctggacaggtctgcaagacccctggaacacttgggcttggtgtgacgggcacctggccaatctgtgttctcacccctgccagtcctgcatgcccccaccccgccacggtctcaatgagaaggggagggtgtatgagctggaagaggggtgtctagaaacaagcccctgacattcaattctcttctcatagaggatgaagacttctccatcctgctggcagctttagaaagtaggtgtgtagctgtggtgaggagctctgggcttgttgggggccactgagctgtgagctgcttgtctggcctgcagcatgttcctgtcccgggccactgggcagggcagcctggggacagtggagatggtggaggtgggccgccctgaatccccagttgggtcattgagtgaccaggccctcaggctgaaatgcctcctccaggagagtatctcacagaggctggtggcctccccacaagagcagtgctgtttctccaactgaccaggtgactctggctattgtatatttaaaactttttttctgaatgggcatggtggctcacacctgtaatcctagaactctgggaggccaaggcaggcagatcacctgaggtcaggagtttgaggccaacatggcaaaacctgtctctactaaaaatacaaaaattagctggrtatggtggtgggcgcctgtaatcccagctacttgggaggctgatgcatgagaattacttgaacccgggaggcagaggttgcagtgagctgagatcatgccactgcattccagcctgggtgacagagcaagagtctgtcagaaaaacaaaaaagaagaaattctatcagaaattccatgtagaattgtttctttttttaaacacagagtttgagcagctgactgttgatggacacaaccttccttctctcgtctgtgtgataacaggtaccgcctgggaccctaggtgkctgtttggttgggggatggtggagggggagaggcacgcagcctttaccctgtgcttcccacgatcttgtctccttaatcttcactgcagctctctgcatagggtcttatactgcttgacatgggggaaactgaggctcagagggtttcacagcagggcagggagcccagatttgaatctgtagatccaaagctttctactttttcagtagtttccaagcatctttttgttgttgttgttacatcattagtgtctttttttcttttttttttttttgagacagtctctgtcacccaggctggggtgcagtggtgtgatcttggctcactgcaacctccgcctctcacattcaagcaattctcatgccttagcctcccgagtagctgggactacaggggcccaccacacccagctaatttttgtatttttagtagaaacaggatttcaccatgttggccaggctggtcttgaactcctgacctcaggtgatccacccaccttggcctcccaatatgctcgaattaataggcatgaaccactgtgcctgaccatgtcattggtgccttaaccaarcctcttttaagttttcaaatggaagagcccctgtcccacagttactgctgctgagccctttcaaggtgactcagtgaggagggagaaaagcggaagtggtgtgggaagaggcgggatctgggccagctgctggtcctgctctcctccctcctctggcctctaggctcccaggagtggtttggaacccgcgccatgtgctctggaagctgtggctgggcaggggcggtttggaacctgcgccatgtgctctgggggctgtggcagggcagggggagtcctcgtgtcccctgtgcacaacacagacaaaaggctgggtccacccagtgggcggtcgcgtgccaggccggtgcttaccccgccatgtttgcagnnnnnnnnnnnnnnnnnnnnnnnnnnnnnnnnnnnnnnnnnnnnnnnnnnnnnnnnnnnnnnnnnnnnnnnnnnnnnnnnnnnnnnnnnnnnnnnnnnnnnnnnnnnnnnnnnnnnnnnnnnnnnnnnnnnnnnnnnnnnnnnnnnnnnnnnnnnnnnnnnnnnnnnnnnnnnnnnnnnnnnnnnnnnnnnnnnnnnnnnnnnnnnnnnnnnnnnnnnnnnnnnnnnnnnnnnnnnnnnnnnnnnnnnnnnnnnnnnnnnnnnnnnnnnnnnnnnnnnnnnnnnnnnnnnnnnnnnnnnnnnnnnnnnnnnnnnnnnnnnnnnnnnnnnnnnnnnnnnnnnnnnnnnnnnnnnnnnnnnnnnnnnnnnnnnnnnnnnnnnnnnnnnnnnnnnnnnnnnnnnnnnnnnnnnnnnnnnnnnnnnnnnnnnnnnnnnnnnnnnnnnnnnnnnnnnnnnnnnnnnnnnnnnnnnnnnnnnnnnnnnnnnnnnnnnnnnnnnnnnnnnnnnnnnnnnnnnnnnnnnnnnnnnnnnnnnnnnnnnnnnnnnnnnnnnnnnnnnnnnnnnnnnnnnnnnnnnnnnnnnnnnnnnnnnnnnnnnnnnnnnnnnnnnnnnnnnnnnnnnnnnnnnnnnnnnnnnnnnnnnnnnnnnnnnnnnnnnnnnnnnnnnnnnnnnnnnnnnnnnnnnnnnnnnnnnnnnnnnnnnnnnnnnnnnnnnnnnnnnnnnnnnnnnnnnnnnnnnnnnnnnnnnnnnnnnnnnnnnnnnnnnnnnnnnnnnnnnnnnnnnnnnnnnnnnnnnnnnnnnnnnnnnnnnnnnnnnnnnnnnnnnnnnnnnnnnnnnnnnnnnnnnnnnnnnnnnnnnnnnnnnnnnnnnnnnnnnnnnnnnnnnnnnnnnnnnnnnnnnnnnnnnnnnnnnnnnnnnnnnnnnnnnnnnnnnnnnnnnnnnnnnnnnnnnnnnnnnnnnnnnnnnnnnnnnnnnnnnnnnnnnnnnnnnnnnnnnnnnnnnnnnnnnnnnnnnnnnnnnnnnnnnnnnnnnnnnnnnnnnnnnnnnnnnnnnnnnnnnnnnnnnnnnnnnnnnnnnnnnnnnnnnnnnnnnnnnnnnnnnnnnnnnnnnnnnnnnnnnnnnnnnnnnnnnnnnnnnnnnnnnnnnnnnnnnnnnnnnnnnnnnnnnnnnnnnnnnnnnnnnnncgccttcccgggttcaagcgattctcctgcctcagcctcctgagtagctgggattacaggcacctgccacgatgcctcactaattttgtattttttttagtagagatggggtttcaccatgttggccaggctggtcttgaactcctgacctcaggtgatctgcccgccttgggctcccaaaatgttgggattacatgcgggaggtgaacctgggaggtggaggttgcagtgagctgagattgtgccactgcactccagcctgggtgacagagtgagactgtctcaaaacaaaacaaaacaaaacaaaacaaaacaaaataacaacaaaaaaaccaaattgtgatttagtagaaaaagtgtcaacttacattttcagatgtcccagccaggccgtgtggctgcttggccggcttaagccacttgtgcttggggctgtcgggggtcttatccgattttcactcccctcgggggatgttgtctcactgtgctgggaggatttgtgttcccagggcagagaccagtgctctgacccacccctcttgcctagcagggtcggtggacctgggtgtctgtctgcacacatcctccagtggcctggacctgcccatgaaggtggtggacatgttcgggtgctgtttgcctgcgtgtgctgtgaacttcaagtggtaggagcagaacccgaatctttctggggatagcttcacagatccaccgctgagggggaagcagtgtagagtgagctgcccacagtgaggycctgcccctcggtcagtccagcacacactggaggccacgaggaggagccctgcggttactgtggctgggctgagcctcactgaagtagttgcttccatttagagctcatgttatatttaggttggtacaaaagtaatcaccgtttttgccattaaagatggcaattacttttgcaccaacctaatatgaaaaaaaagcatsttaaatactagaactccactcggggcttttgctcctagagtagaattggcgggaattgcctgcaggcttacatggttttctttgtttctttctctcccaccatgtcccttttggccaagctcacgtggtgggtttgaatcagttaaatgagtgtcatgctgtggccccactccacccagcacagacgtgtgtttggaagggcggcgttagaggagattctagaagcagtagccccagcacaagctgagcccttggcccctgctcaggagccggctcctggatgggatccagggatgtgagcccctcctgtgagctgagctcagggaatgtcgggatcaaacctggtgccctagaaaagtcatcttttatgtgctgagccagtcccccgggtgttccctttacttgttccatggccatggagttaagaaaaacatgcaaaaataattcttcagtccttgaagagcatccagcacagaaggtacaaaccccccttaagtctccctcttcaaatcggtttggccatttagatgtgtacccccctttatacccttcagatgccaaatctaagaaccaccccccggaaaacacaccccctgttccaactcccagcctggcttgagcatggggtgggaggctgaagcccaggtgggcaccccaggggtctggtgtcttctccaggcagctctcaggctcccttggttctctctgcagtttacatgagctggtgaaacatgaagaaaatggcctggtctttgaggactcagaggaactggcagctcagctgcaggtagccacatctgccaccacgccagggtggagagggttctggagactggcactgagccatgctccctgatccctgcttcccacagccagggtgggaccatgtggggtctggcggaaaagctagggagagagcagaagtcacagaggctggcctactctgctgtcccgtttcggtacagtaggctcgggaaagttaggacacacccccacctgccctctggatttatggagctgacactccacaaatgatgctggagccgggtgggccgggctgcagtttcggaagtgatcaggatcaggtaggtgcatgggcaaagggaacttctgggaccagccttgaaagatgggtggaattctgcaaaggttacttgtttcttattgctaaaagtaatacatcattcttgccaacagaatgattggcaggattttcagtaaaggtccaggtcagaagtcatttagactgtgtctcctagtctctgtcagaaccatggtactctgttgtggtgtgaaagtagccacagatcatcttcgattaaggggtgtggctttgttccaataaaactttatttacaaacacaggctgtgggctggatttggcctgcaggctgtagtttgtgatccttgattcagacagtttagcaaggctgaaaagaacaccaacacccccttgttacccacagatgggtgggacttggccagaggccaagaggagggtgctcgcaggggaacatacagcgtgtagaggccgggaggtgctccagggcacgaagtgtgggaaagtgggacagaaagcgtgatgtcaagttggaggcggagcgctgctggggcgtgaagagtctcgagtccaagtgagggagttaggaacttgggagggtttgttgttgggtcggggacctggggtcagccaggtggtgacctgggatggggtggggacaggaaatgagttaagctctgctctttatttttttgcagatgcttttctcaaactttcctgatcctgcgggcaagctaaaccagttccggaagaacctgcgggaatcgcagcagctccgatgggatgagagatgggtgcagagtgtgctccatttggttatggacacataactcctgggccagaggctaaaaccccgggacccctgctgtccttcccgcagcttcttctcggagtctcagggcaaaccctttcgagcagcrcctcccagtggccagaaggtgaaatgacggcagtggtgccgcctggtaaatgaattggttctgtgacccgggaagctgtgcttggctctgatttcttttctggaggctcggaaacacttcctatcttcttctgttcttcacgccccatgcccctgctagcggattactgttctgcgacttccgtgtgacctctgcagtactcctcatcctgcgtttgctctccaggtgtcatctttccgccgtgttcctaacattttgattcctgtcttgaaaaaagcacctgctgcacygtaagcccagggatgtggcagctgcagtgggcttggctttgtgaagaacygagtgtgtccacggatgtggcagctgcagcgggcttggctttgtgaggaaccaaatgtgtccagggatgtggcagctgcagcgggcttggctttgtggggaaccgagtgtgtccacattgggggaacatcatacttgatacacacgtttttatttgcacaaagaaaatgctatttttggagccagagatttcatgtctgattgatggtgattttcttaagaaccagaattgctggcagaaagggagcacccacatgcttagatagccgatgtcttattagagggcagtttgtggttcctgatttggaaattaacattctccaaacattccagtccaatgaaagttttatccgctttcccatataaaaactcttcccacgagagtgacttgattctcacaatcccgttggagtcgtatgtgagtcctacagtgtgaggttcagcattgccatctccaagtgctcttcgtagggaaacagtttctggtcatgacgaggttccacttcccatctgatcccagcccggcctggaaacagaggacatgtgtttcaggatggcagtgtttggggacaggacatgagcgtattgtgtggggctgctaggacaggcctggcggggtggggggtgtgtccaagtcagtttacttggttcacaggttcccaggcccacccaggtgcctagaattggcctccaggatgggacaagaaatctggttttgcatagaaatggctagcagcaggcaccgtgccgctgtccactctctgcccgcatctgccccagcacttggcacagcgggacagacgcagagatctgaacccacatctacctggctgctcagtcaacccactattcacaaagcttagaaagcgtccaggcacagtggctcacgcctgtaatcccaacactttgggaggccaaggcgggtggatcacttgagatcaggagttcgaaaccagcctggccaacatggtaaaacctcatctctacaaaaatacaaaaattaggcaggcacgatggtgggtgcatgtaatcccagctacttgggaggctgaggcaggagaattgcttgaacccaggaggcggaggttgcagtgagccgagattgtgccactgcacttgagcctgagtgacagagtgagactccatctcaaaaaaaaaaaaattacacacacacacacacgcacacacacagcttagaaggggctggtgttctcataagcacagatgtctgaagagccgttagccagaatgattctttttttttttttttttgagatacgatcttgttctgtcacccaggctggagtgcagtggcacagtcattgctcactacagcctcgactcctgggctctagcaatcctcccacttcctgagtagctgggatgacaggtgcgtgccaccatgctagtaatttttttattttgtagagatggggtcctgaatgcatggcctcaagtgatggtcctgcctcagcctcatttattatttttttttaaacagagatttactctgttcccaaggctggagtgcagtggtgcaatctcagctcactgcaatgcatcccaggttcaaatgattctcctgcctcagtctcccgagcagctgggattataggcgtgcaccgccactcctggctaatttttgtgtttctagtagagatggggtttcaccgtgttggccaggctggtcttgaactcttgacctcaagtgatccgctcacctcagcctcccaaagcctcagactcttacagtgttggattacaggtgtgaaacactgtgacccgggatgattttcaatcacagctttttgttacgagtggaaaatgcatatttataaaaatgaagtagtacagacatgaacgtgtagaagtctctataatcctgccatccaaggatggcaactgttaacgtgtatatcagggatgtccaatcttttggcctccctgcaccacattggaaggagaagaatctccttgggccacacataaaatacactaatgctagcaatagctgatgagctaaaagaaaaaaaaatcacaaaaaaacctcgtactgtttttaagaaagtttacagatttgtgttgggccgcagcttggacgagcctgctatatatatattctaggttatcccctataggtatacttatgtgaaaatgattattgtgataatttgtttttgagatgaagtcttgctatgttgctcaagggggccacaaactcctgggcttaagccatcctcccacctcagcctcctgagtagttgggaatataggtactcataactatgtgtgggtgattattattattttttaaacaaaaatggggctgggtgcagtagctcacgcctgtaatcctaacactttgggagcctgaggcagcagatcgcttgaggtcaggagttcaagaccagcctggccaacatggcgaaacctcgactctacaaaaaatacaaaaattagccaggcatggtagcacgcacctgtattcccagctactcaggaggctgagatgggaggattaagcttgaaacctgggaggtgggagggtgcagtgggccgagatggcaccactgcactccagcctgggcaatacaaagccagactctgtctcaaaaaaaaaaaaaaaaaaaaaaaaaaaaaaaaggtgggtgggggcttatactatgtgtgctgcttggcactgtttttttcacttcaaagatattgcaggtattttttcacataagtatctgaagaaagacttccttttttttttttttttttttttttttgcctttttaagacagggtcttgctctgttgcccaggctagagtgcagtggtgagatcagggctcactgcagcctccacctcctgggctcaagccatcctcccacctcagcctcccgagtagctgggactacaggtgtgcacaaccatgcctgactagtttctgtatgttttgtggagatggggtcccactatattgcccaggtaagtcttgaactcctggtgtcaagaagtcctcctgccttagcctcctaaagtgctgggatgacaggcctgagcctcgcgcccggccagcctcctgtgctaggttgtgcgggactctgtcgtggaacccagtgtgtctttgtgtgctggcttgtttgttggctctgtagttaacgggctgctccacgtggacaggcattggacccgtgtctctgtgtgcaggcagaggctgctgcacgtgcatctgtgcacatggctgccaggaggggctgtgctcagggggagctggggcaaaggctggtggcaatgaggggcttgggtgtagtgtggaggcacgagagcctggtggccgggctgcagcctgtgggagctcgggggttgcttggcctctgtgtgtcccagtgtctttgtcagtgggatgggacaatgatagcacactctcacaggtgctgggggctgacaaatgtcaggtctgaggacagtggctggcccactacggggccagttccccttctctatagtcaccctgctcgtcttccatcaactgggtgctcaggacagtggcgtggtggatccgcctgtacagcctgtgccccagtgtcctgcaggccacagctgtgtccagccctgaccccgactgcccctcctgccacctccattttatagatgaggaaaccgaggcccaagggcttagggaaccttgctctgaagcacacagtagggctgctgggctcagatcctccctccctgtgctgagctgccctcctcctgccacaaggcccccacgccccgagcccacccttctcaccggcctctgccctagttccccgcatggtgtgggagtgtggggcatcctagcttttacccggcccccagttctttcacttccactggagtcccgcagggacagcttggggaccatgcaggccccggtgggcgtgggggctcacatagctcagtggtgaacagctggcacgtctctgggttgcagacggtaagggccacatagacttgaggagcccgctggtgctcccggcaggcagccagcctccgcaggaccccgaccagcgacacgatggcttctgggctatacagcacgtctacggtgaaagcttcaggttactgaaagggaccagcggatagttccaggtcatgctgacctcagcagcagggcgaggccagagaggcagcagtcatatgagactagtagatgccatttgaccatttgggccattagatggaaaggcaattacttgggtgaaaaaggagaacccttagtagagaaagctgcaaaagaccgaagcaaaagaaaaaaatctccagactcactggtgttccttaaaaaacgagctctggttctcggcctatctagagggctgtgaatgacacaaagcctgatcctgccatgaacttcgtgtttcaggcgtctgccaatttgtctgctggcttgcaggggtgggcctgtgtccctggccaccgctggacctgtggttttcagggctgggacccaggaccacaggcagagctctgttcgaccagagaggagactgagtgtgctggcaggggcgaggggttttcggtggcccagccaaacaccaccttctctcaagggccctgtcctcatcccagaagtggttttttcctcctgtggtctctgaaagacacaggcatgactctgggacagagccatgtggtgacgactgtaacgggagtatgcctgtctccaacaagagggctgtggctggaaggtcaccttaagaggcacccctgtcctttgatgtcaccctggaggcccagagtaactcttctggaagccccatcatgtccatgcccgacagcgtccattgttcccttttcccagagccaagagctgggtagagcttcaaggacaccacctgcacagagtgcccggggctgggcattacctgctgcaatgacaacatctggctggattgcagattgctgatggaccgtcgcgacgtcccagtccagctgggccactgtcaccctggggctgtctaagttggcagagatatctgcctctaatgagaggccactgagaaggacattccctcagagcttctcgaggacccggctgtgacagtcgctgaagatgtatgcccaggggcggcacatcttgcagatggccaggcctgtgaggccggcgccactgccaagctctaggaccatcctggtgggaggaaaggggaccatgtctgcgactgcaccagggtaagcctgcctcggtgccctgccgtgcaccccgaggtcacctatgagagaaggctgccgggttctcgatggcccattctgcaaggtagagggcagcatctcatgtgaccaggcctgtgatgccgtgggagatgatggctgtgttcttggagagtgtgactgagcctcctgagggctgcaccaagagagggagagagagtcagtccagcgatcagaaggcaagtggcttagaagacaagtagccatccaccacatggctgaataaaccatgacaggaccaatcgccactcagcaaagagaagcagctaactgttgacatgccaacagcttgcacaggcctcaagggtgtcacatggcatgaaagacactcatctcaggccacacaggatttcattcattgaacattcctgaaacaacggaattctggtgatggagcacaggtcagttgtggccaggggccgggtgtggctatgaaggggtggctgccttgtgatgattcaatatgctatgtttttcctttgtggttttctgtatctatgttttatcttattttttttttgagctctgttccccaggctggagtcagtggcacaatcttggctcactgcaacctctgcctcctgggttcaagcaattgtcctgcctcagccgcctaattaggtgcaactacaggcatgtgccaccatgtctggctaatttttctacttttttttgagacagagtttcactcttgttgcccaggcaggagtgcattggcgtgatcttggctcactacaacctccacctcctgggttcaagagattctcctgcct

SEQ ID NO: 93668 - DNA, 46690 bp, Homo sapiens
tttacccatgcactctacaagatcggtgctagtaccatcctcattttcagagacagaaatggaaacagattaaggtactgtggcagactgtatctttcacagatggccccaatggatctctccttggacatgctcttctgacaaagtgacctaggtacttttctcatggagtggtgggatcaatgtgccctccccctagatagaaatttctatctgtaaagactaagcaaatggtggaaatggcactatatcacttctgcctgcttcttttgggcagcttgctcttggaagcaaaccaatgtgtgacgaggcccacatggagaagaactaaggcccctggtccagagtcccagctaagctcccgacagacagctagggctaacttgccagtcatgtgagtgagccatcttgaaagggaatcctccagcccctagtcaagccaccccagctaacatgatggagcaggagcacagatgagttgtgcccactgagctctgtccaaactgtagatccattagccaaataaatgactactgctattttacgacactaagctatggggtggtttgttatacaaacaacagataacccaaagaaccaccagatgataagcagcagacccagggtctaaaccagtccttattttgttgagctctctacaacatctatctgataaagatgaccatcccctcctccttcaaatgttatctttcttgctgtgtatgacatcactgcactattgtttcttctacttctcctgtcatcccttttaatctcctttgctggctctgccacttatattactcatcgaagtattcttggtattactaaggtgtctgtcccttccctccctgcgcaatctcaatcacttctacgacctcagtaacatttacgaccaactcccaagtctccagggctccacctgctacccggtatctcacaggtaactcaaactcaaaatgtacaaatccaaattcacattccccctcctaatttgaccttcctccatgtttgttatcctgtttgctcaagctagaaacctggaagtcatccttgactccttttcctctcactttcagacccaatcagggactaaacctcatcatatttcatctcccaaatattttctaaatgagcccacttctctccctctccattgcccccacctggactactgcatttaataagcttggatttctgcaatgacttctgatcagtctccattcctccagtaatactgcttccaatttgagctaaacagaataaagaactttttttttttttttttttttttttcagatatagggtcttgctgtgttgcccggctagagtgcagcggcacaaagctcaccatggccttcaacttcttggctcaagagatcctcctacctcagccacctgggtaaaaagactacaggcatgtgctactatgcccggctaattttttgttattttttgtagagacagagtattgctatattgcccaggatggtcttgaactcctggcctcaagcaatcctcccacctttgcttcccaaagtgctgggattacaagcatggtgaggcccagcatgaacagaataaagaactcatttaatcagaataaacacaattatcctacttaccttaatcacactcccaatatggttctgttgaattaagagatctgttagttctgcagtgttcacaggagcctttagaaaaagctaaaaggaggaaaaaattattttaaattaagatcaaagcatgatttctaataacttcaaatcctatattcaaatacaaacaatgaaatttctgtgacttaagatgatgatctagaaaagcaaccccaagagggaaagaaaagcccaggagagtcaaagaagctaaagattaggaaatttcagaaaagaagaagtcagtagtaatatagaagtaatgggggagggggagaaaaaagggagaaacgagagaggataaacttaaggccaaagaatttggtgaaaaagacggtagagctataaaggctaaagaaccaaagtcatattatatgagtaaaagaataaggagaagcagcaagcatcaattttatagcaccaaacagcacagttatatgactgttacataagaattgtgaattaaaaaaaaaaacaaaataactctaattagcagatgaaaggaaataattcttccttccaggcaaggtggagaggatagaaatggaaattctaaaaagatgaacttgggagagcctgtattgaatgacctgaattttctttttttttagagacagaggctcactctgttgcccagactggagctcaatggcacattcatagctgcagccttgagctcttagactcaagtaatcctccagcctcagcctcctgaggagttaggactaacggtgtgtgctaccacagttggctaatttttaatttttttgtagagacaggttctcattatgttgcccaggctggtctcaaactcctgggctcaagcaatcctctcacctcggccttccaaaatgctgagattataggcatgaaccactgcacccggcccctgatttttcttagaagaggaaatttatgcataataaataaaagacaatacctgctgcagtaatttcttaattccgtcataatcattatctgatagggaataagcttcaaattcaatattcacttcctgtaaataacacacaaaatagttgttaccagaaaaactacaaacatctagactttaaaacaggcaaacattgccaagattgccatctgtgaagaatacaaagcaccttcacactatttcttcaggtgacacaaaagcctgagaaaacaaaacactcagagtaacctagtttaaatgttgagaaagtccagttcaaataaaccagacacggcagccacaaaggataaattattttcctgattacaagggtgggcaaaaatcaaaatcacttcaaaagtccctggaattgcctagagcttgacttagcccatggatttgaggttacactacatttgcttagcaaatatttattaagtatcaatccaggtaccaagcactgtgccaggcactcaagatgaaaaggttagtaaggcagacacaaatgatcctgctctcgtgcagcttacgatttaggaaggaatataggcattaaggaaatattcatagaaataaatgtaagtgctataaaacaaaggtacacaatgttgtaacaacttaaaaaataagaagtcagtcaggaaagccttccttgaagtgacatttgagcaagaaaccgagaaacagcaaagagagttcctggtacagggaacagcacaaactaaggccctaaggcagaaggaaatacaatgagtacaagggactagaagaatgaatgtgtagctgggctccctgatctctatctgcaagacaacagaatctagaagatggaactaaaatgccaaaaacaaaacctagttgcttttaaacactaacaagattagtccttgaggaccctaaatcagaccttgataagtgacacaatgaacctggggctctgatgaaataatatatttaaaggcacttcaggttttaacggtttcagaatttaggtcttagctgaagaacatcgcagaggaaatcagacctccttttaccttgccaccctgactatgtatatatttaagtcttccttaattgtaaaattgcaaggccctggaattgcttagagcaattccagctccaatttgaactctttaagtccagctttgcagacttcaaatgctaacttagccagattatgtgagcagcaaaacacaaggggtcgggtgggagtgttccaaacaggatcaaactaaaccaaataacaaactgtcattattcaggacttaaacttattccttagatataaatacattctgtaaataatgctcatctagtgtttttttctttgtctagacagacatctcggacctctgtcccagactattatggcaccaccagggaaatgggcggcaaatggattatctgtccagcacccttttcctgggtatgggctcatctccacatggcttcagcaggaacagtcacgtttgtagaaaagagccctgtccctcattcccaggtgatttagaattaagactgtggtggtgtgatagatttcccatgttaacacaagcagcattgatttctataacccaaaagtaataaaagagccagtcaaagttctaagtgaaaaatggtgagatggcattcaaggcatagagccaaagtaaaatttgtaagggaaggaagattgatcacatacccacaccatggtgtcacctctaatcctgcatccatgcttctctccatgctcccctccatgctcatcatgactcatgattacctctctgattttatttcctatcactctctcttccttattctgatccagccatctaggctgcctttccgtccctcaattgtgaagactcttgattttcttgtaaatgaactagaaagccaatgcagcaatctaagcagaggcctgagatcagacctataagatctctctgactgtaagtggagtatagactgattgtaggggaacaaaaatggagaaaagaacgccggttaaaagctgttacattaaatagtagtccaggcaagagatgatagaggtgtggactacgatggtctcagaattagtgctgagaaatgtctggataacaggatttactgatgggctggatataggatgaggaaagggaggaattaaagttaagccccaggttttgggttagagcagctggtgactttaggggccatttatagaaatggtgacgattaagagaggggcatgaattattatacaaattctgctttggacaagttaaggctgaggtatctatttaaacattcagtaggctgaaggatcattcagtcctaattgtttactaaacaaataataagtacctatattgccaggcactacggtaggacctagtctgaagaaaggaacacagttctatgagactatgaaaccaaagatttacccacgacttggtcagctgccccaggagccagaaaatacagcctagctgagatctgaagaaggaagggaaaactgcaggataaagaagagcatttgaaaaggcttctacggtagaacgcggcaagagccttcaagaaactgagggcccaagtgagtgccgcccgcagagtgaagaggaggacagctgctgccccgaggggagagggccccctctgcgagcccggggtggccgattcaggatctgaggcttcagcctgagaactaaagaggacgagaagaacacacctgttgtggcgggctttttcggggaggacgcgggttgggagattaactggaccggactagacctttaaaaaataactactatggctgcagtgtgttaaagaccgaggagaaacctgagaaagaacttatctccagtttctcctcacagaccctcagggtcagggaagaccctacactatttttacacagcctgggcttgccaaaaagtttttctcaggtataaaccaactaggggagcgtgtccttctcacctcgtcaatgacctcgtcctcttcatccttttccttgtcactgtcatcatcgtcttcatcctcattttcgacttctttttcctcttcctcgtcgcgctggactgggggatccggcggctgcggaaccccactttccacggcacgccgcttagacctggacgccatgttgccgctcacastgcgcctgcgcagcttccccttgcctgaccttccggaccagcccatagtagccaagggggtgaggaactacgaagaagctcggcgctgagtgcacgtcaaccccaatgcccctgctggattccgcagccatgaccccttacagtcacgtccagcttgcggtcccatcttgcttttttcttccgctttccaccctccatcactcctcccaaagcttcccctccccttcccgtagtggttcaacccatctaacctctggcctcattccgtggcctggatggcggtgcgcatgcgcgagcscctagctgcgcgcagccacccacgmgaccccagtctgaggtgcggggtcctggggcccrgygcgggtggcygccgcggcccctcgggctgcgtggggagggggcttccgcccctgttgtcattgctcctgcagccttttcgctgggactgcgcgacaccgccccccgaccgggtgcccgctgtgtgccaggccgggtgctgggcacggtcccgcgaggtaggtgtcgccgcccgctgtaccggtacggacgccgaagcccgcgggcgtgcaggggcccggccccgggcggtgtgtgacacagtggggccagggccccgaggcttccgcggacctgggcctgcccaggcggggatgtccgctgccgctaccgctgcgccggtgacggaaggcgcctgcccagcctaccctcgccgagcttctggagcgcatttcttgacctaaaagtttttttaaagccggcaccgcagttaaaaatgcttcggcggggggccgggcccggtgtctcgcgcctgtaatcccagcacttagggaggtcaaagcgggtggatcaccagaggtcaggagttcgagaccagcctggccaacatggcaaaacctcatctctgctaaaagtacaaaaattagccgggcgtggtggcggacacctgtaatcccagcactttgggaggccgagatgggtggatcacttgaggtcaggagttcgagaccagcctgcccaacatggcgaaatcccatctctactaaaaatacaaaaactagccaggtgtggtggtgcgcgcctgtagtcccagctactcaggaggctaaggcaggagaatcgcatgcccccaggagacggaggttgcagtgagccgagatcgcgccaccgcactccacactccagcctgggcgacagaggtagaccctatctaaaaaaaaaaaaaaatgcttcggggccagtggggtagtctaggttaaagacccgagcctatttggagagaagagtggaggggactgcggccaactgcagagcgagcgccagcccctgtggcaggtggggatgcagcctggggcagccaggtcttcccattgcgagagaaacagggttcatcagctttctaggaataagatctgcggttctcaattgatttttctctgtaaaatgaggggggtgggttggatatgtttgattctaggaatggtgtgagctgcgctaataggctgcttctgtttaagcagggtaacatctgataaatcagtgatccttcatcagtacgagatggcgtgccctaaaggtccccaggagcccagattgcccataatcgtgttctgtgatttcggtctttcctgggagtctcttgtctacccagccatgtcatggatattaaagtaatacttacacatcagcgctccacatctgatggggcagcttgaaatggcctctttgggtcgcacaactgcaaaaacatgttcctgtaatggagaagagaggaagctgtcaaaaaagacccatcaaaaggctaagattagaaaaaagactcagaaagaccatgtgaacatatcaacagagttgcactgagataccatagccaattttttttcctgtttctttatactttttttatggtggtaaaagatacataacatacattttaccatcttaactatttttaaagatacagttcagtggcatgaagtgcattcacattgtgcaaccatcaccaccactatccattggcagaactcttttcatctagcaaaattgaaactgtagttaaacaactcccttattttccctccatgacctttctactttccatctttattaatttgactattctagaaacctcatgtaagtggagtaacacaatattcttccttttgtgactatttcattcagcatgatgtcttcaaagtttatcccatgctgtagcatgcattaggatttccttccttgttaaggctgaataatactccattgcatgtatagaccacattttgtttatctacttatctgtcggtaaacattttggttacttctacattttagctgttgtaaataatgttgctatgaacatgagtatcaaatatctgttcgagtccctgctttcaattctttggggtatatatgtagcaggggaattgctagatcatatggtaattctatgtttatttttttgaggaactatacttttttgtagtttgcaaatctttcacagtaaacaggatcacttttgtaagacaagtaggggaaaaagccttactttatgccctcagattagttcccagtgttgagctcatggtcaaagtgtgaattagaatagtgaatgtgaaagtaaatacagtactgaccctagggaactgaactcagcaggtagtagattgcttaccactcgttcagtgttcatctttagctcagaatttatcttaatgaggcagagggatggtagcaagtggttaggagactgagcatgggcttcagaccaggatccaaattccatctctcccacttactgtgctgtgtgacctgggacaagttastcaaacctcccagggacttggtttcacctcctgcaaataaggctaacaccacctaccttgcaggtttaagtgaggattgcagtcttgcatgtaaaatgcttagcccagtgtgatagttacttttacatgtcatcttgactggatcacggatgcccagatatctggttaracattatttcttggtgtgtctgtgaagttgttttcagaaaagatgagcatttgaatggatagactgagtaaagtggattgccctccccaaagtaggtgggcagcatccagtctgttgagggcctaaatagaacaaaaagccaaagaaggaagaatgtgtcctgtctcctcctgcatgcttgatctgggatatcttctgcccttggtgctcctggtgctgaggccttcacactcaggctggaacctacacccttggctctcaggccttcaggctacaacaccagccttcctgctaacaagtctccagcttgcagacagcagatcatgggacttctcagcctccataactgcatgagctaataccttataacaaatccctttctagatgtaaatatatgccrttggttctgtttctctgaagaactctaatacacccagtaattaacatgagtaaatgctcagtaaaagggtgactgttgttattgctgatacccagaacaccatgacatagaaggtacgggtttgaggtttggttctttcttaccagtaaggtgcccttattccagtcattttttttttcttttctttttcatcaatgattgatgaacataagtatgagggtaaaatggcagagcaagcattagactgtaaatctagagacaggttgagccctctttttaccagtgccgaggtgagtttcatgttggaagcttcaggagcagcttcatttctgctggggcttctcccgcctttttccccctcaatgggaaataacaggtttcgttattttcattggaaaaaaaggcagaggaaaccccagacactgcacggtttttaggccctagcctcaccagtctcaagcctcctatcaaggagggccatatagtgcctctgatctgcttgatgcagaccctagggtccttcccactcccatgagccacccaccagagtgagctaagaaatcaactggcagagagcagagtcacgtatggccaagaggaattgttctgggggttgtttagtaagcaggagagagggaggagaagaaaaactgcacagggatcagatgcctccagcagaagaaagcgaggcatagagatcccttaccatctgagtcacgtggcaccaaatatgttaccagtggcaaatcagtagacacctgcagcaacctcaatcttgtctcctcagaagaaaattcaactgggggcataaggcagaaaaagtgaccgaggcaagcttcagagcaggagtggaagtttattttaaaaaactttaggccgggtgcagtggctcacacctgtaatctcaacactttgggaagccaaggcagccggatcacgaggttaagagatggagaccatcctggccaacatgctgaaaccccatctctactaaaatacaaaaattagctgggcatggtggcgcatgcctgtagtcccagctactcaggaggctgaggcaggagaatcgcttgaacccgggaggcggaggttgcagtgagttgagattgcaccactgcactccagcctgggcgacagagcaggactgcatctcaaaaaacaacaacaaaaaactttagaacaggaaagaaagtagagtatgcttgggagagacctaagcaggcaacttgaaggacaagtgctccattttactttaaggaaaattaatcattctttctgtttcaaagatgctgggtaaaattgaaattgttgttttcccacaaggtgagcaaataatgagcatctactacaggaaagaaagtccatcaaaaaagccaacaatggagaggctcacagcccctttccaatgtacaggaatctgaaactgagactgaggcaagagcagcctagaccagaacccagacactggccctcctgtgcaaacaccctctactccaccaagcctcttcctaaagcccaaggtggcgacatgttaacctatctgtgcacgcttctcaattgatttctttcccaatcagcctgataatatgtgactctagcacagcaaagaatcatcaacaacagaaccttttaattttawattattattattattattattatttagacaagatccttctctgtcacccaggctggagtgcagtggcacgattatagcccacagcaaccttgaactcctgggctcaagtgattctcccacctcagcctcctgcgtagttaggactacagggatgcgccactatgcccggctccttgttaacaacttttaaaatttttgtagaaatggggtctcgctatgttgtccaggctgatcttggactcctgctctcaagcaatcctcctgcctcagcctgccaaagtgctgagattaccaggyatgaaccactgtcctggcctaattttatattagaaatgctttcagtgtttgggaatgattgtatacaggattaaaaaagaagacaaatgctttcagtgacgtcagataaaggataagggtagtagttggatttttatttgcaacacatctcagggagctctttattatccagaagcctaaacttcatgccagcatcggttttattacctaagagaaccacagattagaacccaggagaaatattttctctgtttacaatgggtagattgatttttctttggggtgtttgcataactaaactaagcactttgtactacagtgatactttatatttttatacctctatttttcccaaacattttcgtattcaaagtgtatgtgaggcataatatagcgtagggggttaaaagcacagactttggagccagactggttgggtgtgaatcccagctctgccacgtagcaattctgagactttggatgagtgtcatcctctgtacacctcagcttcttcctaagcctcgtaggtggacttaatgcatgtgaagctcttagaatagtgcctgggaggcagtaagttcaatagatctgttcgctgtttttatcttctttgagtcactcagcaaccctaaggcttggtagggcagaggttattcccatttaacatgggaaaaaacaagatcacaccatggttaagtcataaagctgagaccagagctcaggtccgttggcccttagtcctgtgcttattctgtgacaccatacttccttccttatattatcaccttagagaagggagaaggtaaaagggcaagcagaaatgaggaaaagagaggagaaatacatctataargctgggtgcagtggctcactcctgtaatcccagcattttgggaggccgaggcaggtagatcacctgagctcaggagttcgagactagcctgggcaacatggtgaaaccctgcctctaaaaaaaaaaaaaaaaaaaaaaaaaatacatctataaacaagaagcttcccgttgctattaagataagagccacattccctaatatgacccaacgagacccaaaagaattctagtgtgagcatctttatgttaatctttggacacatttatcagtattgctttagtattcttagaagtgaaattacaggaagaaagaagatgaagtatataaagcttttgatgtcaacaaatcgttttccatgttgttagactctcttatgatacttgacrtttagaaaacatcatttaataagtagaagagtcaatataattatttcccaaagtgcttatgagctacttagcatatttatcttgaaatggaaaagctatttatctccttaaaacataagataycaatttctctgtttgttgttgatacaaccctaaatttacatcagttctctttccggaaccataaacgtttggcataggacacttggctttcactaatggtttcatctgtctttccaagtgatatcaactgctaacatgctctttcttggccttatcagtgacaggggtcttcagaaagaacaagcccattagtgctaagtcatggtgtaggagggataggtctcttccacaagcatttgattgccttcttcttgtgtaccgtccccatcggaaattgcttaggaagagtctttgagatctaattaagatctgtttccttgctctgtcgcagtgccctataaggactgccaggcaataatgaagkttyttttactgaaggatgcgaaggaagatgactgtggccaggatccgtrtatcagggtaagtggcctgagactccttatcccacagtgtcctttctactgagtcaaggggcctggagcaggcagggatgggttttgcaaaacctcagaggaactgacgcagaataaattgttaatgttcccttattttaaaaacagccctagccaatccagaactatattctttcatttcaggaattaggattatatggacttgaagccactttgatccctgttttatcgtttgagtttttgtctcttcccagtttctctgagaaggtaaggcctgttgtgactgagcaccatgttagtgtttgatttctcccttgccagctgaagccagagagggactattttactgtctycttattttattcccaaactttaaaacatggcagcataacttcacctggctccaggaggctgctgctgttgggaggttctgactgagcctctatcagcccctccagaaagccacccagactcagagattggggcccaggagagcaggtcatggtgagagcagcaaacctgcattgctctcagcagtcctagaaccctttcactcatcctctcatttaatctacccctcacccccaacttctgcaaagcaggccagggaggtattattttcccgttttagagattggggtctcaaattaggcaactcagctaagacctctagcaagtaagagacagggctgggactcaaacccagggcttctgcccacaacttcagttcttcttccagtgaggagtgataaaaattgcaggagacaagtccagtaaagccttccaaatgcttcagagtgaaaattcagtgcccacagcttcagtgaagtcagatatgtacagcagcctagtgcctggctcagagtaaatgttcggtagatgatatcaccattatcctctttgaaaatcaggacttcagcattgatatcaccccctgaatattcccatttttattacagattcgggtcaagtcttcccccactacctgcacccyactctaatcccaggctgcgtcaggcttcccctctgtgctgcagtgcacttatcaccctgtgtttcactgtctctgycctagactstgagcttcctgagggaaatactgggaataaggaattcacctgtgtaccctaaaagtcctagaataaatagttccaggcacatagtaagcactcagtaagtgttggggggatgggtggaaggaattagtttgcctactactattgtgaagcatttggaattctgagtcttagctccttggaagatgttgaacatagccatcgtataaaatgtctttattgctttttggtgtgcagctttctcatcytgaagattacgggggactcatttttaccagccccagagyagtggaagcagcagagttatgtttggagcaaaacaataaaactgaakgtgagggtgggtctgctgtggattccactggacatttatttactcttatttctcctgctgggagactaaattccagaagcagctgcacttctaagagaagtgagtgcttagtggtatcaggtcacagactctgccttgggaaacaggagaacagggctatctcctaaactcccagacagatgaccctgaggaggactttcccctgtctattcgttgttcacctcctagggactgatatatccccttagaaggtatcatctgaaaataggataaatactactttcctgaaagagagatgatgaaaaaatctaactatgagaaaatggtcagtgccaccatgtcaggcacttagtgacccagtcacctctttgacttgtcttcccacctccgtccctcactattagaacagtatgaaaatggcagtgcccattaacagaaccctgggtttcagcctgagcaaacaccttaataaatgcaattgaacagcttcctagctaacaattatggagtgcctgttgtatgtcagaccctgtgtaatgaatacttcacgttcattaccccacttaaccctagataacaatccagaggcacacattgctatgatcttatgtcttatgttaccattgagaaaactgaggccaggatagtaagcacagaacaagtcagtgcagagccaggcctcacactcgggccacccacctccacagttacactgatgagcggaggcagcgggcagagtggttatgcaagggctttggagtgagttagtcctgggtttatgcagccatttggacattaatgagttccttgacctctcatcatgggattactactaatagtaatgggattatctactaacagtagactattagttaggtagaacttactgaatgctcactctgtgcgagactctgtcctgaatactttttcctgtgagatagatgtgcttagtattttcacttggcagatgaggaccctggagaacaaagggtatggaactttccaggcccccacaatgtgtaaagcacaagtgcaggattcaagctgcagagtctgagtcccaaaggaaagcatccaggacattacctggagcagagtgggcatggagtaagtgacagtggtgagttttggttattctgtctccacatttaaccaggcttcgctgtagcctaaacatcccaccttcttggtgatttcatacacacattcacctcttgttgaaaagaaagcgtgagaacctaagaaactcagagccagccaggcgcagtggctcatgcctgtaatcccagcactttgggaggccaaggtgggcagatcacttgaggtcaggagttccagaccagcctggccaacatggtgaaaccccatctctaccaaaaaatacgaaagttagctgggcgtggtggcacatgcctggagtcccagctactcaggaggctgaggcacgagaaccacttgaactcaggaggcagaggttgtatgagccgcgattgtgccattatacgctagatggggaagcatgtgtactctttcccagtggtgctctgggtgctttttcttgcagttgtattttttctttttgtgtatgttttgaggatgaagataatgaaaaagaggaaaaccctagaaaggtcactataactctttctggtgctttataataaagtttaaaatgcattttcccatgtattttcttattttgattctcacaacaaccatagggaataagcagtaggagtgtagttaatcccagttaccttgatgaagaaacagacgaggtgcgttaactgacttacctgggacacacacgttaaggggcagagctggctctgtggaaggctttctgactccacccagtgctcactccagttgttctgctgtgaggcttggaaagtagtttgtttacatgctatggataacttttgaataaatactattgatatttatggggtaggaagcaaagtggaactcaatctttggttaccatttcaaagggaatttcccttaatgtaaagggtagaggaatgctcttgaatttaagggaaagttatgttcataaccagattttggaaaggaagaaccattatttccctgttttctaaaaatgtaatgaatgcccagtagctttatgatatatttatacaatccattttctctttgtgtttctttaatctatatttaaagattttgtttgatcataaaatgataatattctgtatcaaattgtgtttgttaattgacctgaaatttattatttttactttggtgtaatggataaatgaaccctctcctctgagattacagtttgttgactgctttcagatttatgtcccaaataaaccaattggatttccttgttagacatttaagttgctttttttaaatgaccagtgtctttttctttaaaagtctagatttaaatttttgatttcactatgcagattaattcttcaagttatgttgatttcgtggttcccattaaaattcttctagtaccaactgtggagataggctaatatttcaagcaaggagtactaaaacatttatgaaagcaattttttaaaaattgcctataaaacatgaacaaagtgaaaatggaattttagtttgagatgctgttttttacatttggttgctaatagtttgctttgctcacagtttcttagggtgaacaagcagccttgggcaacagtccaaatggccactttggtatttgcaattcacatatcatttcatgttttacagtctgggaaaggtctctgaaagaaaaatggaatgccaagtcagtgtatgtggttggaaatgctactgyttctctaggtaaggagtcaaggtaaaaataaaacaacaaaaaatggcttagccttttcagttttaaaaaacastttaactcagtttaaaaatattattttttgcttattaaatttgcaaaaattaattaagtatacgatactactgataagaatgcagtgaaacaaatataatcaaacatttccaaatggcattaaaaattggtttacatcttttgagaaccacttggtcagtatgtatgcaaaagctttattaaaatgtttgtaccctttggctgactaattccattgtgaatgtacatmatgccactgaattatgcacttagtgattaaaatgacaaattttatgttatatttttactataatttttttaaaagcctaaatctccagatagtgatatcatagttgtttttttttggttttcttaatattttgtgcatttttccagtcttgagtctatttattcttcttaaagcataaaatgtaaatagtaatcattaaaaattaacattragcattttaaatacttaaaacaatgcttagcaattgtcataaattagcctgtaactttgtttcagaacagttcaatttgtccagtgaatttgaaaatattagaggaatgtataatatgagtgaaaatagtttaagaattaaaagcacattttccagagaacaaaatgaggctggggaagaaaccagttgggagttgctaagctaattaaaagatgattcctagatcttctgagcagcatgacttttaccacaagctcagcagatcagccagggaaagggaattagtggcttggttgccaaggaaaccatcttccctcccgcacatctctctccaaaaataagttaagaatttgcttgttactttcttttatcattttttcctgaatgagaagaggaaagaaaatagccagtttctttcattctctatatttcctaccaaaaactcaactatcaaatatacagtatatttatacattttccaaactttcacacattcactgataagcaaacattttgagcatcacatccccttcagtttgatttcggtagcatcactatgcattttgctgtcactgtcctgtcatatgagaagaaaatgagaaaaaagactatggtgatacaatgaatgatgagcatctatgtcttgagacttagagtggctgagagtggaccatatcaagtgcagcacaagcagcagggccttggtctcagttaggcactcactggactcagtctggtccctgtttattcagttgtgaaggaaaaggacatgttctaaatgcagggaacatattatcaaaggagagaggaaattagaagtgttgtaacttttaaaaatgtctttgaaaggaaaccacatttttccttgacatgaaagtcaatcacccaactttgaacattctattttagctcaccttttcagatataataatgtacaaaggagctcttttgagtaggtacagggacaaggcattgcttgaactctctgaggtttctgttcaactagaatctcagcaggagcctggagagttatcagaagttgagcaccaacagctgggaggagaccaggcccaatgtattatctttgctgcgtaacaaattacccccaaattaccccaaaacttactagctagaaacaggcatttatcatctcaatgtttctgtgggccagaatctgggcatgatttagtgggcttctctgtaaccaggccatggtcaagctggtggtcagggctacagacattttgaggcttgacttaggggagggtctgcttccaaaatcactcacatagctgtcagtggcctcagaagatctgcttcccagctcactcacatgggcctcccgagagggctacctaagacatggcagctggcgtcccctgtcgcaaggcaatccaagagagagcaaaagagagcacctaccactgaagccacagtctttttataacctaatcttggaagtggcatccatttcttctgccatttcttttggcttgaatcaagtaagtccagcccacactcaagcggagggatgacacaggggcatggatcacagggatcattaggagccactttccactgcccacaagccctctagtcaagagccacccctggctccctagagcctgggaatcaggttaggaaagttggacatttgaagcaaagagaagacaaggtagacatttttcttgaagtagaaatgaaaacaagggtccagtgaatagcaagggatttcggtgtggaagtccagtgagagaagatgccagtatttctttataaatgttgcacgctgacataattttacaggtattattgattaataatagatggcaaaaagtacatgctggctgggtgcagtggctcacacctgtaatcctaacactttgggaggcagaagcaggcagatcacttgaacttaagagttcaagatcagcctgggcaacatggtgaaaccctgtctctatttatttgaaaataaatttttttcaaaagtacatgctatgtaacattatacagaaagtcctcacttaacattgttgataggttcttggaaactgccacttcaagtgaaatgatatataatgaaacaaatttttttttccttatcaatgttgtaatgaaaacatgttgaatgaaacgatgttattcaaggacctgctgtatgtcgtttcacttacagtggcaatttccaagaatctattgttgacattaagtgaggacttactgtacttggtctacataaaatctcctgagaacattatttggttcaataatatatgcatattttaataacattttaatttttattgaaaaagcaaagatggttggcttgtggtttgataccttgcaactcagccagccatatcctaggaaagccttccatttggctgcccaaaggtcaggtgccccaactttcccatctgattgcaaagttggacctgggcgccatttagtaggcactgttgcttggccttgtaaacccagaccagtgatgtcacagaagatagcttagcaattaacaacttggaattcataacacagaaagactgtaccagcctgggcaacatggtgaaatctcttctctaccagaaataacaaaaattagccaaacttggtagtacattcttatagtccctttaactgtggcagtcagtgtcttaacctctcaaatataaaaaatactctctggcaggtttatttaacacagttggagacaatttgaagtttcactgtcagcttttacttgggcagggcccttaagatgggcttacccagccagagtgttggttgaaatgttgtactgacttgaagcagagtcagtcttgccacatgcagggactgagaccttagaccaaatatgcattccccaaacatttcttgagagccatctgtggactgtggggtggaccgggtagccccagtctctgccctcacaaatagagctggccactgcttaatagcttccttccctctcaagtacagtagtaattgttctgttcacagggttgtggtgtgaggatcaaatgagcaagtgcttactttgtgatcagcaaagctatatatgagagttaatgttctggttatggttattattgtttcattacttgggaaaaatgcatatttatgtcaatattgattaccagcgtcactgctaagttcttatgtctcagttcagttcctgtgggatttttacaggtttttttgtttacttttgtttttgatgcgtttagctcttctaagctcagacaggaggtccagcctcggttgccactgtagcataagcaagggcttagttcctgaactgagttacagctttatttttcttttgattcagcatgtttttaatgatccataagttaaaagctgctggtgtttttattaaagctgccatttgttactaaccaggctctgtgtgactcctaagtggaaagcccacagcacttccttcctcagaggcattccacattcctgtgagcaggtagcagtgttgactgagccagtcccttaggcctcccttcatcagcacgctttgtggagtggccaagtgtttgctgtctggaaaagtgcagggggagcctgagtctgttagcttcttacttggttcatgaatagggatctcacaaaagtgctggtatagcccctcatcctaaatgacttgtatttgtagcgctgtgggtccctgttagcagattattatgaaacctttcctccccttccttccattttagtctggccatgtcaagccataacacctttctggatgtggtctggccacatcctcccaaaaaaatgaaggctctgtaatgccgattcctgcaaaaagtaccaaatgcccatcatctccttcctgactgaagagaaaacagcctttgttgagcaccttctagatggcaagcactttgctcttattatctgacacratccttaaaacagttccatgtggttggtttttccccctcttgtagatgagctatgtggggctcagggaagctagttaaggccttacttacccagcctacacaactggggtgcaggtaccaggacctgatgctttctcttctgaacagacacttgtgatcttccctcagtagctttcaagaaaagacatcctctatgtgatttgtaaactgcatacctgtgtatttgcacgttaaaaaataacgctggaacaaaaggacttcaataaccgtgttaagaaatacatttctttgtggttttccagtgagtaaaattggcctggatacagaaggagaaacctgtggaaatgcagaaaagcttgcagaatatatttgttccagtaagtagaaaaacatcactccaaatgaagccatttattttttgttgacctcacaaccactacctagggaaaagaatatttcctcagtgcattcttggtggtgagattgattggtgagcatcgtataacccactctgggagcatagcctrtttgtatttgtgtatgtctatactktgtgaggtttagcccacttccttctaccccctgtaccaaagaacttgacttgaacataacacaaaataaaacatttgggagataaaaacagtggagagatcacttgagggattccaaagagagcagaggcaggaggtgtgagtgggtactctccccttactgaggactgtcctttcccttctcaggagctacttctgtctctgaattccctctcccagcttgctcccaggtaaagaactgactcatgattgggctgcctgtggacttggatttaaagtggcacttgttctaggggtgttagcatttaaatggggacttagtcttaaactaattatggaattgtaggcttcagaagatacataggcaaaaattcttggagcaagagggatgggaaggctgaccgtctacttgtagggcagccccacctctaaggtgcatctcccttcctctctsttccctgaatgtccagtacaaccgcaagctcttacacccttgtcatttgactcctctgctgtaggtgtaagatcatacacccccatgagagcatgaagtagaactatcttatcttagattgctgaagaggaggaaatccaggctttcctagagatcrtgagctggcaaacttcatctgttaaggatattttrggctttgcmggcaaatggtctgtcagaactactaatctctgcaacagaagcatgagagcagccataggaaataaacaaacaatgggcttggctttgaccccaggctagagttttctgacccctttctaaaattgcttgagtgtctgctgagctgggaggccagggtcagatgaactgctgacagctgagagtttcctctaaggtggtcccaggagaggggtatatgccttggcccttgggtggtgagatcaggatgagtggtatagggagagagtataccttaaataggtctctttatggcttctgaaacagtgatagatggttttgtttctggtaaaacaaagtatttatgttatttaaaaaaaatactcctaaaggtgatgttggcctttcttgacgtgcaaacttgtacactaacgtcttataaggcattacttacaagtcttcctgccgtaagtcattgctgttgcctgaaggttctctagcttatatttttctttgtgttactgggagcttgttctagagaaagtcctgcgtctttttctacactgtggtctgaggatccctggagcttaattaggcccctgacagagtcgtctgggttgggggcggcagtgagcagtcagggaacagcagagatactgctgggctcagtggatcctttccaagttctccaattctccttttttctcttttctaatttcttttaaaaataacttcgttgtacctttcctgagtcactacatgctcggtgttaacgttgaagactagcatttactgagtgcccagcgtgtctcgggtacatagacacgtggcctgtatgatgtcatttaatcttcaccatcaccccatgaagtcagaatcgtgtccactgcaagctgtgctggccagtacagtagccactagccacatacggctatttaaatgtaaatgtaaattaattgaaattaaatacaattgaaaatttagttcttcagtcacactgggcacatttcacaagctcacttgtcactgtggccagtggcaccaaattggaccacacagaacattcccatcatcaccaaaagttctttctgactgtgctgctatagagactcttgggggtccaaggcccagatcttgtccaaggtcacaagctatgaagtggcaggctggaattcacactcagcacagcaaggccactgctcatcccatggcctgtcacattcagaggcctgactggcatctgctccatgccgacctgctctcaaggagatgctggccaagcacctccatccactctgatttacagtgactggggctcctgcagggatgaagacgtaagtgtgcttgactctgtgtttgaatctggtgggcagaggcttaaggagcctccggtttagaggaactacacgggccttttctggccactcagatgaataagctgtagtcccagagtgtttcggccacttggcaatcctgagcctgtgcactccttagttcagtggatgtgcgttcatcggctcggacatggctttcaggtattaatgcattgactgacgcctctcttgccccaccccccatattgcttcccacatcacaggagaacaagtcagttcaatatggttcggcagatgtttacccaggagcacctgtgtgccaggccctttgcagggcgttgggactgaagaggagtttaactccattcctgtcttctggaagttcccagcctagctggggctggaggtggggtagggtggggaacatakacatcagtaaccgtgataaggcagggtggattaagtgaccagaagaggtatgaacagtttttgtatggtgggcctgctattaagatacctgtttctacctgtaaaacactcaggataccaaataggtggggtttttcctcatatcaatgaccaattctccaatgctccagataacagctgggtgtcctacaacttaattttgacattacccagaattaacccagaccccacagctttaagggctcagtcttagcaaactgtcccccactttagatacaagtattggatgctgagggacctctgtccaagttggctacaagtcaggagttctcacgactccctactcaggttcagtaatttgctagaatggctcacagaactcagggaaacacttatgtgtactgatttttataaaggagataacaaggacacagataaacagccagatgaagaggtctggaagggtcctgagtacacaggagcttcttcccccatggagttggggtgcgccaccctcctggcacatggatgtgttcaccaacccagaagctctataaactcatagttgaggggttttatggaggttccattatgtaggcaccattgattaaatcattgacccctggtgactagctccatctccaaccctttgatcacatggttgtgatcctctgtgtggccttcagcccccatcctgaagctttctaggggccaccaccagtcacctcattagcataaactccagtatggttaaaaggggtttatcatgaataacaaaagatgctcctctcacctctaatgggaagttccaagagtttcagaagctctgtgcctggaacagggaggaaaacgaaatatttcctcttgtatcacagtgtcatgtcagggtgtccaaaagaaggcagaggtcttcaggaaagtctgtacaaaaggcatggcctcctctccacagagaagggcaggccctccctcaggcagtagccatggccaagccctcccactcagagggagccactgagcagagacgtggaaggagagggttttcctggagagtacagcatggcaggggcagtgggtggcaagctggggagcactgagtagcctctgagagttgaccggagccctgaggcacggggccttacatcagcccctgcgggtcagactcaggctggattggtcctccccaggcctagacgggaacacaacactgcctgctccctcttagcgggcatcactaggtacagccaggattgggcccaaaaggcagtcactggattaggacccagttctcttgttcctgggactttttaggagtgtctctgaaatttatcccttaagtaaaaagagcattctttaaaacctacagagccatcgcagtctaagagcagggcctggggtgctgtggcaggtcttgccttgaaggagccgtcttcccacagctcagtgtgctccagggcttgctggcaggcagcttccacggggtcctggaggctctgggggcataacagaaatgctatcagggagtttgagggcccgttatgagtctgacatacattggcattttgtgcatgcctttaattgtctgacatattgtggtactgagctgtgacatgggaacgattactagacctgcttttgctcatgaagaaactgagctcagagagggaaaacttgtccataaggaacagagctaatagtggtaggctggggctcaagcctaggactggctgactccaaagctcttcctgtctcccttgctctgtgtgcttctaaaagatacttagtccaagtccaaaatatgctcatttctcttccctcaggtgaagaagtcaaaggaatcttttgaagtgaagaaagtgggtttggacgtgcccttatgctgatgaatcattggagtaatatctggggtttagccgcatccttggtggcaaggcggtggggaaagcccctgagggtgaggccagcctgagccccaagggaaaggggctgctgggacctcctgacctcaactcatctccaggagcgcacagggcctcgcacagatgcctcagtctgtaccgctgggagttcgtgccatctcagacctaccctccctacctgggctgtacctaaagagatactgctaggctttctctagaatgtttcatgagccagcactgtgagacattttcaagctaaaaacatacagttcaggagactgtaatctgtggtagaaagtgttcaccatttgctgctagtaaagacggttrgccctgtgcttctctggccacttgtgccacatggtgttctcggaagaggcctctccatgcaccagtgtggagaagccctctggaggccaattcaaagagcatctgaggctaagcaactgaaaggaaaaggcctgatggccaacgtgttgctttctgtggaatgttccagactggattgctgggggtcattttctttaacagcagcctagacaggcagtgactctcttttattcagccaggtgttgaaatagctgcagggaagccacagacagttgttccagctttccggatcagagagcactggttgggccccgtgccatgtggccccagccccatgggatcgctcctcaggtcatggagccacacatcagtgtggagggttcgctccaggggttcctggtacaggatgcagatgggtcttgtctggctccaggctttttgtttctaatgttgtttctagagagtcatcatcaccgcataaatggtatcaaagcccttcttttaaaaatgtagaaataaatgtaaatggtagatcttgacattgcttgtgggattaagttctacaaagaatagtaattatttctatgggtggctgacaattagctctttaatagaataggtggctcctgcctgttttcagtgaagacattgagctgtacccacagtttgtttgtaaggagacagaagtgaacctctgagtcgttgttcattagaagacccagaaccatcaggctggtgtccctgctttgcaaacacaagacagaagagatcaatgtcacttctgagtgatcacattggtgtttcagttaactgactcaaggcttggttggatagatattaacatattctgaccttatctgggagaatactggtctgcattctttgcaaacttctgccatttcctctaatttattaccagcatatctatgggtcctaataaatcttccatttgcaattagaatatccaaataaaaatccatgttgactgctaataaggaccttcaccttggctttaccaaggcattaatgatttttctttctcagtaaactttgatgcctgattttaaaagctaaaaatctacctctaatgcttgtagtaaacaggccaattcatagctatgcctatttattttagttaacacttaactactttgtgacaggcactattgtaagtgcttaaagctattaatccatttaatctgataactcattgttctgatagattctccttctttcccagatatctcctctaatgggaaagtaattacacactaaatggtaaaaggtagaatacagtataacttttgaaaagagagagaaactgtgtgggcagaaagattgcactgcagtttatttgaaatgtcctcctggattgggaaaatctctgcagcctggcacacttactgggcttttcttccattcctccgatcagcctcctcatccttattatcagcactcaggcgcccactgtctgctcgaactgattctcatggcagtgcccgagagggggaagtcattgttaacttggaagttgttactgttctacagatgtgtgcacgtccttcagtaagatgacattttaaaaagtcagtgtcattgatgcaggactttttgctccttaattcagctaaatctgggttcttgtctcatgaccaggaaaaattaggcatgtggacacattgaagggtgagaagggcagaacttattaagtgaaaggaaagccctcagctgggcgcagtggctcactcctgtaatcccagcactttgggaggccgaggcaggtggatcacctgaagtcaggagtttgagaccaggtcaggagttctggccaacatggtgaaaccccatctctactaaaaatacaaaaattacctgggcttggtggccgcgtctgtaatcccagctactcaggaggctgaggcaggagaattgcatgagcccaggaggcagaggttgtagtgagctgagattgcaccactgcactccagcctgggtgaaagagtgagactccgtcacaaaaaaaaaaaaaagaaagaaagaaagaaaagctctcaacaaagagagggattctccaagcaggtttctccctcattattgaataccaggggtaccacacatgagctgatgaggccaggctcctcccctgcgtaaggtgcgaatcctagtgactccgccccgttcccccagcacgcacacgaggatgcccaggtaaaccataggtagtatcggaaaaggcaacatttgattggttaaaaggcattattcggaaagaatcaattgggaaagggcagacaaacgggcagacgttctgcccctgggtcgctggtttcatctgggaccagcaatctggtctttcagacttcaggctgttctgggcttgaaggtgaggtctcaccggggacccttccctatctgcctaggcatttgtctgcctcctgcttgtatcatcattttcttaattgcctgcagtgactttatcaagccccgtcctgagctgcgtaataataatactgtgttaggattttcagtgttattactcatcatcagcccggacagcccagaattccaggccttcttcctgttaaacgaacggagagcagagcctttgagctccacagttcactatctctgtgtcagccttaaccatcccattggcctgttggggctgaagataaatccccaggcattaagcatattccaaaagggaataactcctttgtctttggctttttgaagtgggctagttttcaggacatgtagttgtagatctctcctcaccagcaaaggaggactcagccaggacattttcaattttctcctttctgctgacagggtggtgccttttcagtgaagtcagctgagctggttggacatttgtgggccctgtgtgcctgcagagccaagctctctgcaaggcacaggtggtggagagatagagacaagcagctgccctcagggagccgcgtaccccttcggcccagccttgtgagtcagagataagaatgagcagctcaggactccactggaccctcacaagaggtgctgccaagggaagattcctgactctttccaaggcccctcgcacacctgtggggctgggcttgctgaaaaactggactgtagttctcttactggatccccaggaagagctttggcccctaacatcttccaccctgcattccccaacacacacatagacacacagaaacggggaagaaaattgcctctgaacwtggctttgaaaatatgtctctagggatgcagagcatgaaaacatttcctcgcactggaagagagaaatcagcaggcatctattaacgaatttaacaatctcccaattcattattttattttatgttggtacagatatttacagagcagtttaaataaagaaaacattcaccagtatgtagcctttatacacttgaaattaagtggcctgcagttattcctgttgtttggctgctgcttgctagaggtggtactggatggaaaggggttgttttgctccttcctctcgttgtagtcaccagagaagatgtgatcagagagatcataaggatgtgagaaaatatacaatgtgtatgaataacgcccattaaaatttcttatgtcttacggatggatgtggggggtaatggctggttctactaaaatgctgtgttttcacatttggggaagattctggcatttgacaacttatcagcttttttggacagtattgttgcaaattggcattcaaatcctatgctgtcctcactattctgcaaagagttaagggctgaaaatgcccttaagtcttcccagagtggagatgctgggagcagaggttgtggtgaaaggagaggcaggccgttcttagcaggcttctctctctaaggcctgtgcattcgccttttggcacttggcctagtggctgttggtgtggctagaagaggagtgggcagtgagcttgtctttgttgggggtggctgcagagccactcctggctgccggttaccggctgcctcctgagcatgagccctggctcatctggagcctctttaaaggtagaaaatgtttgccccagtgccagtcagcaccaggcctgatcttcaccttcctgacttagttaaggtgcaaagtctgccttctaaatagtgactgcaggctagggagtcacttcaggatcagaaggagttaaaagaatgtggctaacttgtttgtgtggatgttcattttctgagcacctccacacacattacctcttatgatcttcatataacaacccttcaagttcrgcaaggtagcaggtgctcttcctgtttacagatgctgaaactgagtcctagaagcagagccaggcctggagcccagggctgcttcccccttcccaaagctgcccctccccattcccctgtgcacaggcactggccctgagttttcacaaagcctggttatttattcacaggggagtcctcagcactgcctcttctatttccctgtggaaacctcaaaagagaaatcctgccaaaagcgctcaaggacaaaggcgagtagaatgcwttgactgcatcccttaccactttgggatccaccaggagcctttgcagtgatagaagtgggtggccctgcagagagcacacaagggagagcagggctgggttggataagccaggccaggagacacagagaccatgctcatgggaagagtggacgtgcagtctgcactttcctttctttggatccactcttcycagcttgttagctcaagctaggagcacacagtgtgtctccagtccttcaccaagaggacaggagatcgagatgtggaggtggcccctgggcagataactgaggtgacaaaccatagaattggttccacatgtagaagaaagtctacaaatgtagccgatcttataatagcatgcagcaccctccagccgagccacacaagctccacctgcccctccagctccacctgccgtggctcccaagactgtcagcacctagaaaccagttcttgcctctgaagcatgctgccgtcctcgatgcagatgtcttagctgtcacctgcgcaccttttgctgtcacatagttagtctgggagcaaagtctatcagtggtttggagtaccagctttcggatgagataaaaacagatttgaattctccctcttgctgtttattagctatgtgaatgaaggtaagtgatgtaatctctctgtgcatcagtatccttatctgtgaaatatggttatctgtacataaccatggtacctgcctcatagaggtgttcagagatcatgtagcatgacaccttgttctccaaaggcaagctctccatggaactatgactgttactgtctctcccagggttttgaagctctaatagtccacatgagcagtgtgacccaggatgaccttagaccttgtaactttccccccgtattaaaatggagctagatcgtatcccttctacccatatcatctgtcttctaaagctaccaggaataaaggcagaggacattaggtaataagatcagcaaaatcattagcttttcgggaacaagaaaataccaggataaaataagagaaagcttggtctcagttacccttaaagaaataatatataaatcagaggtttgatacttcagtttatttctttagttttcagggatatgaaatggcaataggttgctgttttatgctgaagttatcatttcttctgagagagtttcccattttattttcagaagcctgagttttcactacttttcacctaccatctggctgcccctcataagtcaatatctgactgaaattgcgtgagtcccttcagtgcctagcgcctcatcaccagccctgaaaacccctgggaatattcagagtcgctgaatggcacagggaggaatgtgggaaagtccacggcytaatcagttcttgtacaagtggacacactgaggcccagagaggggacgcgtggccatgtggaggcacagctggagtgcagccggggatctggactccaggcctctcccaagagctgcccttcctacacttgctggtgtcatgcaaccagtctgtgtgggatccatggagtgactagggacggccttgtgtggacaaacctacataagcctgggaacaaaaggcattctgggtacaaatgaaggctttggtttctgggcctttgttctttttctgccgtctcagcctcctcttccacmggaccactccacagcgtttagcaggctgcagaggactgttcaaggcctctctgctgagtctggcctctcagcttccaagcagctcgttccaggagggtggtgctgtattgggaggtttcaccaactgtgctgtgaagtggtggaggccccattgtgtgcccagtgcggtaaagtctttcctgcttttgattgtgcccagggattgccatggaaagcataactgtgtatcagacagttgcacacccaggaatccaagggaacctgaacagctactattcccagcmggtacgtggcgtttgggggyggttctggcagggtgggtgcccaggtggggaagcasagggtgaagggcacgagctgatagatgttggttctatatgtggtttcactgtccccagctgtcacctgcatgcsttttcctgtcacatagttggtctgggattctagaattaggaatggaaacaattttgtggttgtttcatgaaatgtctattgcaagctggtttgaaatcagtgatttcggtaagaggtgcttgtagtaggtggtctatgaaatctccctctttggagagattaatgtggtgactttgaggaagtggtaagtttttataggggttaaaggagataatttacgcaaagctttttgtacagcatcgaagatacatacaaccctgaggtaaatagtggccttgatgttatcattgctattcatcatacggggaygctggtggagctggaggggcagacactggaragggaggctgagcccatagtgggaagagctgacagtggccaccaaggagtctggattgaatttgggagtccgtggggactgttggaggactcaggcaggagaatggatagctcttgcttgagttccttgatgtcttcagcatttatatgcagtaaaacacctccctttcctctcccagggcaagcttctgaatgtcttgcctggtattgggagggcctgataggacaaaccaaatgcaraaaggccaggcaggcttgtctgcttgctctgcttccagagggagggagcattgacagggagccagcactgcctcacaccactgcctcatgtgatcagtgccgtatgaccacaggagctagaggcattgtctaggctgctgggcacatgagctccgggatgcccatgtcctctggccaggcagacacagacctggggcagcaccagctttctgatggcagcctgctctttccaacagttccctaccagaatcctgcctcactggagcagaggatgccagcatcagccgggaaccactcctgtgctaaaaccgccttggtggcctgtggcttgaggtcttgatgcggatgaagccggaggaatgttgtctctcctcagtctcatggcaaggaytgatcttgttttctgttccccacagdgggttccagccagcatcacattttttagtccctctggcctcacatacagtctcaagcacattcaggagttatctggtgacaatatcgatcaaattaaggtaagttattcaatgagcttttggtctttttcagattcttttttttttttttaatctttatgaattatcctagggcttcaatgtcaagtgagacacccctggcctagcaggtgccttagaattggaagggcagctctacctcctgctgggctgttgcacagattgctcaccttctcccagcccgtttcctcacttgcagcatggggataattgtctctctgtggctttcatagacatgtgtatggtcttccctgcttaggatgagtctcaggattacatgagggaatttgagtaaagtcctgaattagctcagggcttggtacaggtgttaacatcctttccttcctttcccccatcttatgtttgccattattgtctattctaaaagcagtcacctttttcatatcttttaaagggtttacattctcacttactagggactgtatttattatgagtctacaaataaccacaactcttgtgtctgtaatagaaacaccyttgaactggctccagagggactgaggagagggtgcaggatgtgacccagagcccaaggacagacactgccactcactgcagtcaggaagagcaaaaggcttcacctgccttctcacaggtgcatctcatgtggggagtatgcaccgctctcccagttttaaagatggagcacggggctcagagacatcatatggcctgtctgtaggtcacactgctgagaaggaagagctgcagttgaacctgggaagactgattccacattgtcagccatggtgatgccttgccatggtctcaggagctgctgagcagttgatgcacttctgggcagtaactgatacaattctcacaccagtccagtggtgggtatccagaaaaagaggtcagtgttcctcattacaggtgaggacactgagggctagagaggtgaaacaacttgccaaagtcatgttttgagttcctagaaggcccaggactcacacaggtcaccgaggaagaaaaacaatatctgaatcttrtggttagaaagattagagagaggccgggcgctgtggctcccacctggaatcccagcactttgggaggcctcaggcggatcacctgaggtcaggtgttccagaccagcctgtccaatatgatgaaaaccccgtctttactaaaaatataaaaattagctgggcatggtggcatgcgcctataatcccagctacatgggaggctgagacaggagaatcgcttgaaccctggagactgaggttgcagtgagccgagatcgcgccacggcactccagcctgggtgacaagagtgaaactccgtacctgccccataaaagaaaaaaagaaagaaaaagaaaaattaaagagataggacccataaagtgcttagcatggcaactggtccatatgaccagcgcttacgtcatattgcaggtcaggatgggtcacggtgctggtcctgctctggttcttgtccctctgtgccctgctgcctctcccctgggcctgtaggaggagtccccacctccaccccacccacccacccccaagtcacacaatgctgtgagatgcctggtggtataagcctaacacagttttccccaagcttcttagtgtttgcctagaggaagaacaaaagatttatactctatcttctttcaaagtgagcatatttaaaagcacaaatggatactcagcatctgaaccaagaactcaggcctttctgaatagactgctgcctgcattgtccacacccatggcagctgggggctgagtgcgtgttcctatcctgtatctgtcacacccatttctgcagccctccagacactctgaggagctctcagtagccccctcgcctcttactacagtgattgattaccctgcctgccagtagttaacacctctgccattgctgaggaggagaaagtgacagagctggccttgctcacagtgactatggactgcttgggggccacgaaggcactgtgtgtggggtgtgagttgtccctcgacactgggacttggcgctggatagtgaggtgctttcaaggttcacagaggacacagtcctagcccgtgagttggtagttaggcttttctgtctcagctcagcctcagatttgctactgtcctccctccccaggagtccctgtagggcccactgtttgtacagcattgcacaacatgcaggcgcaccacaaaagatcaaagggggtgacttccgacctgaacttgctacttatccattgacttgggaagaccacgcacttgtctataaatgccacagagatgtcactgcaaagcagtaggtaagcagattcgtaatcaccaccaccacactaatggcagcagctgaatttcctgtgtacagcaaaatgcccttgcagcctgtgaggtgggtatcttcacacctagtgctcactagccacagtggcagagccaggctgtgaacgtggctgctgcccccaaagccaggctggtgcactcacgtccagtttgtgccagggatggagaaagaacgttgatgctgggccccctcgcctggcctggggaagactgctgctctgtggggcagcatcatgtgagcattcattgacacaggagtgaaaggctcctgtgaaaaagctgctgtttcaccaaactgttgatacccctgctctaggactacagtcatgtttgccatttgctggttcccagtcccagggagtttctttttttcaaatttttaaatagctttattgagatgtaattcacaaaccataaaatttactttttatgattttaatatgtaaacttaaaaattttttttttatttttttagagatggggtctcactgtgttgcctaggctgatctcaaactcctggcctcaagtaatcttcccaccttggcctcccaaaatgtagggattacaggtgtgagccaccacgcccagcccaatatgtaaactttaacatgatttttatgagagtcacagatttgtgcaaccatcaccactgtctagttccaggacatatcatcaccccaaagagaaacccggtacccattcgcagccacccctcattccctcattcctcccactccttggcaaccactcaactgtttttcatctccatggatttacctattccggacatctcatattaatagaatcatacagtatgtggtcttttgtaactgactcttttcactagcatagtgttttcaaggttcatccatgctgtagctggtaccagtacttcatccctttttagtgccaaataatagtacatgctgaggaccgttttatttacccattcactagttgatggatatttggattgttttccactttcaggctattaaataatgctaaacattcaaatacaattttctgtgtggacatacattttcatttctcttgggtgtatatctaggagtagatttactagatctaaggtaactttaacgttcggtcgaattactgctattttccaaagtggttgtgccattttgcattgtcactagcaatgtgtaagggttccagtttctccatatcctccatgtccttatttttctgtctctgattatggccatccttgtgggtctgaagtggtttctcagcatgtatttgatttcgatttccctaatgactaacagtgttgagcatctttttatgtgtttgttagtcatttttatatcttctttaaagagatatctattcaaatcctttgcctacttttaacccaggttatttgtcgttttattgttgaattgccagaattccttattctgaatacaattttttttttttttttgagatggtgtctcgctctgttgcccaggctggagtgcagtgacacaattgtggctcactgcaacctccgcctctggggttcaagctattctcctgcctcagcctcctgagtagctgggattacaggtgcacgccaccatgcctggctaatttttgtatttttagtagagatgggggtttcaccatgttggccaggctggtcttgaactcctgacctcaggtgatctgcccacctcggcctgccaaagtgttggtattacaggcatgagccacggcgcctggcctctgaatacatttttttttttttttgagatggagttttgctctcgttgcccaggttggagtgcagtggcacgatctcagctcactgcaacctccgcctcccgggttcaagcaattctcctgcctcagcctcccaagtagctgggattactatatgcatttttagtacagagggggtttcaccatgttggccaggctggtctcgaactcctgacctcaggtgatctgcccacctcggcctcccaaagtactgggattacaggcrtgagctaccatgcctggcctctaaatacaaactttttatcagacatacgatttgtaaaaattttctcccattctgcgagttgtctttttacttttttgataaagttcaatttattgtttttttcttttgtttcttgtgcttcgggtgttgtatccaagaaaccattaatttagtgttgctttaattcagtgttttgaagatttactcctatgtttccttctacgagttgtgtagttttagctctgaacttaggtatttgatctgttttgaattgatttttgtgtgttgtgtgaggtaggggtccaactttattttttcctcagggagtttcctaagcaatgggtgcttagcaaggcagtactgtgggcggggtgggagcggggcctctgcaggacagtggcctccctcccctcgttctgactcagccggaggaaggagcctcagtcccgcagcatccgaggttatgcagaggtacaggtggcttgttacctccactaccacctggcctgctgctcacttgstgggagggaggatgaagcggagtgctgggcaggggctgccaatgttggatgctcacttgctcccaaacaggtttggggtccacagtctcaatgcagaggagagtgggggatgaggaccttctctcatttaacccccacactagccctctgaggccagggtaactgtgccccttttataggtgaggatcagagaggctaagggacttgcactaataacagctagcagggggcagagccgggacagaagcagtgctccatcccaggcgaggctctgcacagaaccatcgagcctgtggtgcttgttcagagagagatgtcctgtggatgaggccagtgccccggattggctgattggaagtatcacgacaacataggcagcagcccatgacggtcattgagcttatctctgggccaggccaagtggttcacacctgtcacctcatttgatccccacagcagcccagtgaagagtcctgttatcttttcggtttgacagatgaggagatggaggccagagaggatgggccacsggccaaggtcattgtcctgtggagctgggatttaaatcccaaccctgtgcccacagagccctgaccttgatggctctactttcttggggattcagtcactgcccctgccacaccatcctccccttgatcagacccagggcccccaacacccgaagaagaactgtctgcagctagagcctctgaggaaggactgcactgacacagccgtgatggtgagcaccagcctggggccttcaagtccctgcccctcacctgagcctggcgacagtcgctcagggtggcagactgatgagagcgtggatgcagaggtattttgcacgctcagaagctgggctagaatcgggcagtgttgtcatttttataaacacgtcacatgagcagtaacgtccaaccgcaaagctggctgacggcccctgcacacatccagctgcctgctgccccagcccctcctggtgtgctgaagccctgttttctcttctgtctttatagtttgcagccatcggccccactacggctcgcgcgctggccgcccagggccttcctgtaagctgcactgcagagagccccacgcmayaagccctggccactggcatcaggaaggctctccagccccatggctgctgctgagtcagccacctagcgctggccccatgcagcctccctgggctgggctggctctggatggagccaggcatcggyaagggctctcgggagctgctgccgtcagactcctgcctcaagcctgagtggaagcacctgaggaccggggatcgggacctgacctggggctggcctcaggcccacgtgcacgtgactgccctctgtggaagccagcttaaaccctagccctgtgagagcttcctgtgcccagcaggaaggaagtcaaataaaccacactgactacctgtgcttactgagtgtatggttgctgtgtgtcattttaagtgcaaagctgtgttcagggaggagacaggtatgcccacctctgataacccacaaacctgctatgaatcagaaaatttgctctatataaagtaggtttattcattctataaaaaggaccgtgaagttcctgcttgtgagccatggacaactgtggttcaaatatagaaagacttgctttccctcaaagatgcagctgcagcattagacagtcaaaccatctgatctcccaggaatctgaggggctagagaggccggtatttactgagaagaggttcatgtgcaaatgcagtgccctgcagaaaggctttggaaatctgttcccaaacttcattcccaaagttcccaaacttcattcccaactcagcctgaagtttaggctaagttgactgaaacccagacttgtctcttagtagcatgtgggctggtggtgggaaggctctgcccacacacctctgtctccttgaaagatctggctgaaaggcatttgggctccccgtctctgatctccattcctcataaccctgaggagtggacattcctattgttccatttttytggtgaggaaacagactctggtgaggtgaaatgatttgtcagggtcacatgctagtgagtggcagaaccagaacaaaattaaaaggcatggacgagcataagcactgaggcctagactaatgaaattcatcagccacctcgtaggagattcacactagttgagaggttagaatttggtgatgattgttctccaaatcttgatgtgagtatacagaaattctttgagaactgttctaaaacgggattatggtgatggttccatgaagtgaccacttgtgtcaagattaaggaaaataattgggcaagcactgtttcatacacgttttcaccatagtaccaaagtgaaatagatttgcccaggaactaagaacctggctatacatcagaaccacgtaatgtgcttctaaaatgaagtagctcaggccccacccccagagagtcccctgaattggtttctagaataaagcccaagcagcaggaggtgttagacgctctccaggtgcctccagtgtgcacccgtgtttggaaactgctggattgcaggaatggggtcccccatagctggagtgtgatcaggaatgccctcatgcatggtgaagaggctggagaagcaagacaagcccggaagtgaggaaggaggaggagaagtccaagctgtaggcagacaagagcgggagggatgtgtgggcttcggaagcacacattgaaggaggaggaaaaacaccctgttgcagggcagggaaaataggttccttttcagagcctcggggtaggggacagaatcggggacaaaggttcactaaatgtctacatgctagtaaacaccacacgtgtgtcctttcatccccacacaacccgaagccaccttttgaagagatgtgaggctattaacagttctggcgaagccttgtttcagatggagtgcgccagggcatggttaaagatggttctgtttgggatcaggaaggcagggagctcatacggggcgggagatgagcaaagcagcaggcgcagtgtcctcgacgattgcgtgagtcgggagcctgggcttgctttggcaattgggctggagattcctgagaacgtgaaggctgagtaggcaaaagccagtttgaaagggactgtggagaaaccctggttctgaaggtattggtgggacagaaggtaagatctgtaattactcagctcaagaaagtgaagcccagggatgtcacacctcatttcttctgctcaccctcccacgggactgcagtttctgttaagggcaataattatgttaatcattctatggctcagtggctagatgggagtgaacagaagctggcataaggcttttcttcaaagatacaactgcagcattaaacagaccatctgatctcccaggaatctgagggtctgggaggtcagtattttcttagaagaggttcatgtggccaggcgcggtggctcacacctgtaatcccagcactgtgggaggctgaggcgggcggatcaggagttcaagaccagcctgaccaacatggtgaaaccccatctctactaaaaatatagaattagccagatgtggagggtgcctataatcccagctacttgggaggctgaggcaggagaattgcttgaagccaggagttggaggttgcagtgagctgagatcgtgccactgcactccagcctgggcaacaagagcaaaactctgtctaaaaaaaaaaaaaaaaaggttcatgtgcaaatgtacagccctatagaaaggccttggaaatctgttcccaaacttcattcctactttttaatagatccagctattcctgatgtgctgggagaggttcagctttgagttcgtagatgttctaggtgccggattcccagagtcaatgtgggaagccgggtggaagccagagtctcactcgacaccctgagtggcagtagggccacccaggacggtgagtgagtcgcaccccccaccctgccagctccaaacagagtaacgccccagcaggctgggtggccagcctccttgtgtccttcctggggatcagaagggacagaagggtggggtgggagaagacgctcaacagatgtgctgcacagggttttgccacagttgtgtgatctacattccctttttgcatctgctctcacgtgccttcccctccagctcctggatggaggagagttgctgaagaagttcatgcagggaaggaataaaggatcacacaggaatttgagagccaaagtaaagtgcaactggccccccaggcccagaggggctagcagtgagaactgaagatgttccctctggaccttccggccacagctcattgatgggacatgttctcagacagtgttgtaagttttgtgtgctttaactcatgagttacacgtggtcactcacttaatgagttaagcgttaatacaacttccctgtgaatagaaggtaacaaaataaaaacattgtgttgtatacaagtcttcagaaaataagctaccaagaatcattttactaaaaattctaaggaagtagatgacagggatagagtcagtgaggtggtctcaatattcattactctggaacaagaatccttgatattcagcaaagtacgtggtcatttggaataagaactacatttcccagcttccttcgcaggcaggcatgagagtgtgattaagttgtagccaaggggatgtagtgagatgcacacctctgacatcattcttccttcttcctgaaatacagatcgaagagctggagctccagtgggcatcttgggccctgagatgacattggggaaagaaagttttctggaacaaggtgacactgtgggcacaaaaactatcccaactctagacttcttgagtgtaaaagacatatcgacttctatcttgtttaagccactattactacgagattttttcttttacaatcaaatctaaatgataaaataatcaagtgaattggtagagtaaacatcaagataaaccgtttccgagtttgaataaaatgcccttttaagaaaatcttggcctggtgcagtggctcatgcctgtaatcccagcacttcaagaggccgaggcgggtggatcgcttcgagatcagcctggctgacatggcgaaaccccatctctactaaaaattcagaaacttagctgggtatggtggtgcacatatgtaatcccagctattcaggaggctgagacaggagaattgcttgaacttgggaggcggaggttgcagtgagccaagatggcgccactgcactctagcctgggtgacagagcgagactccatctcaaaaaaaaaaaaaaaaaaagaaaagtttggttactagaagtccctcatatacttactgttgaatctttttatcaagttcaattttaagctgtgtatttgcatattatttatagatttatgccttgtgcaattatataaagtgtttgaaaagcaactgaaacaacaaaaagacttcagcagcagaattctcattttcacaaaatactgataaaacctacaaaagctgcaggaatgcatttgcttggacagtttctttcgttcttactggtaagcaccctactgcttggaaggtatgcacagtgcttacaggagaaatgtagtcttttatcatatttatctcttgttaaaagaaaaccttagacaaattacatttgagagagtttaattgagcaaagaatgatttgcgaatggggcagcccctaaaccagaaaggttcagagaggctggggcgctgcctcgtggttgaagatttatggacagtaaagggaaagtgacgtacagaaaatggaagtgagatgcagaaacagctgaattggttacatctcggcatttgccttatttgaacagggtttgagcagttggccacctctgattggctgaaattcagtgattggtacaagagtaggttacagcctgtttacacatctaggacagagcccaagctgtatcctacaaacaggctgtaacctactcttgtacccatagctgtaactatttaggttacagttcactgtatacggagaattctttaggctgaacttaaaacatgtaaggaggcagctttaggctaaacttaacactctgaattaaaagagacttaaacatttcccctcaacatctcatttaatcctcaaaatagccctatcaggtgggtcctattacctgcattttggggacaagaaaaactggacttggaggaatttaatgccatacacaaggttaagtgaggtggaggcagattgaaactttgctgaccaagggctgagagagagttagatgagagagtgttcccacgggaacgctggagtccacctccccttggcggggctccccaggactgcaggacgggggtcatgttcctcggcatggcctccaagcccccttttcagcctggcttgactgcccacagcccgtgtgtatgcgcagctccaagctgtggtcactccacctctctgacattctgagaccttgttcttctcagggtgtttgtgggctcctgagagctggacctgtgcttgtctctgctccctgagcccctagcagaggcctaggactcataggtgtggggggtaatgatcggaatcctgcctttaccatcagcgatgcttttcccagataagcttctcctctcagccccagaagcaaatcatgagcaatattatttatttctcagaacattttacacggtgtttgttaatcaccgcattaagctattgaccctccaatgggctgtagcaacacttttctcagtggtgaacacatctggaggcagcagctcaaactctcttaacggatgggaaactgatgctccgacgacagggtagagactcctcagcgtcaacccgctttcggcggcaggacagaaactgggcctgggcctgagatggttccttcctacacccttctccagggtaccgtgtccacctctaagcctctggaccctctgacatgtaacctgtgtcccctccccaagccagcagagagacccaggcgtggtgcggttatggaaagagctggttcttgttctcagcctgatgggtccctcaggggcggcgcatgtgtagcagcttttcaggagtatggggggtgacgggagccaggggccacgtggtgcagatgggagagaggccagcagatgggtctagcagcagtgggttgagctttgccgtgtaacctcggcgacaggggctttaatctgcatggaaaattctgcatgcttcacactcatggggcctgtcaccaagctgactcactgagttactttactgagtgttcagcgtgtgactaaatttctggacctggggagttcgtaactttttcctcacctctcacccaaacacccccaagtcctgtaaaaattgcatttccagagacggaaaggagtcccacgtaaccagccagatcccatctct

SEQ ID NO: 93669 - DNA, 55609 bp, Homo sapiens
  misc_feature (1)...(55609): n = A,T,C or G
cccaccgggtcagtgggcgcatgatggccaaccacaccagcatctcctcactcttctagagaacctgtcgccaatatgacaagctgcggaagtgggaggccttcctggagccgttccgcaaggaggacatgttcaaggacaactttgatgagatggacacaacacatctagggagattgtgcagcagctcatggatgagtaccacatggccacatggccagactacatctcctggggcacccaggagcagtgagtcccctaggacagggaccctcatctgccttactggttgaccaaggccctgcctgactgaccactcacttagagcacagatcagggacctcacacatctctttctcatatacatgcattttctgttagtctgcgaacacattacttctcctcttatgagactatttatctttaataaagcagtggatataaataaattttttttaaaaagtggatatctgaggggagtgcagtgacacactggcaatcccagcgctttgggaggctaaggtgggcagatcacctgaagtcatgagttcaagactagcctggccaacatggtgaaaccctgtctcttctaaaaatacaaaaaaaattagctgggtgtggtggcacttgcctgtagtcctagctactcagtaggctgaggcaggtgaattgcttgaacctgggaggcggaggttgcagtgagccaagatcgcaccattgcacaacggcctgggcaacagagcgagactctgtctcaaaaacaacaaaaaaagtggatatttttaaaacctttatgtttttctctttttggatcttgtttttctggaaaaagatttttttctcagttgactgaattccttttctccattttgtcttgctacccttaatgcatgcacgaggccctaaaataatttctgatggcctgggactccttgagaagaacagaaaaggtgccatgcatgccattttgggaaaaacctctgtttttctcatgaaaacccagcaattaaaagcagataggtccccctcaaaatctgtttttgtcttccagctatccccatgtattgggccctgaaaactgcatgctttcctagccctgctcttaaagggccccactcgaggccaatagtccaattaggagattggtgaacagaaaatcttgtaactactggatctgctgctgtttgtctgtgcagttatatgtgttgtgtgtgatgtctgtaaaaaagagagctctaggccgggcacggtggcccacacctgtaatcccagcactttgcaaaaccgaggcgggcggatcacgaggtcaggagatcgagaccatctggctaacacggtgaaaccctgtctctattaaatatacaaaaaaattagccgggcgtggtggtgggcacctgtagtcccagctactcaggaggctgaggcaggagaatggcatgaacccaggaggcagagcttgcagtgagctgagatcacgccactgcactccagcctgggcgaaatagcgagactccgtctcaaaaaaaaaaaagaaaaaaagagagaggtctaattaactggcctaaaggaaaataagtgctttgatcagatatttttgaagggaaaataaaagctgtaataccttttagttcatgtgactttaatccttgagaaataaaaacagtcttaaagattactggtaaaatgcaaatgtgaacaggtggtctaaattatacgggacagatattaggtttgctaaatgttttacagttataaacttcttctttggactttgagaactgttcaacttgcctactttacaacttggcaaggcccaggacttggcaagggactcggtaaggctcttaatcttagcaaataatcattaatcatataatctcagtaaaatgttctaagaaggaatggacatggaaatttttgtctagggttaaaggattattttaaattagataagataaagctaaaggtttaaacaagttgtggaaggtttcttgcaaaagaaattctgtgtgtgaacactaaattcaaaagggtattatgtttttctgtaaataattgagcattgaaatacaagcacgaggttttctttttctttttttttttgagatgggagtctcgctctgtcgcccaggttggaatgcagtggcacgatcttggctcactgcaacctctacctcccaggttcaagctattctcctgccttcgattcctaagtagctgggattacaggtgcaggccaccatgcccagctaatttccgtttttgtttgtttgtttgagagtgggtctcgcactgtcacccaggctggagtgcagtggygcgatcttggctcctggcaacctccacctcccaggttcaagcgattctgcctcagcctcccgaatacctgggattacaggtgtgcaccatcacacttggataatttttgtatttttagtagagacagggtttcaccatgttggccaggctggtctcgaactcctgacctcaggtgatccacctgccttggcctcccaaagtgctaggattacaggtgtgagccaccatacttggtatcacttaactttctgaggaactgctaaactcttttccaaaaatgactgcaccattttatagtcgcaccagaatgtgtgagggttccaacttctccacatctttgtcaacacttgttgtctgtccctttaattacagccatcctagagggtgtgaagtggtatctcattatggctttgatttgcatgtcccttataactcatgattattattttcttgagacagggtcttgctctgtttcccaggctggaatgcagtagcgtgaatggggctcacagcaacctcaacctcctaggcccaagcaatcatagctgggactacaggcatgcgccaccatgctctactaattcttaaaattttttcaagtatctgcttttggtgaagaaaaaaaattttttttcttgtagagatggggtcttgccatgttgcccaagctggtcctgaactcctggattgggtgatcctcccaccacagtcacccaaactgctgggattatagatgtaagccaccacaccaggcatttttttttctttctctttctttctttctttctctttctttccgtctttctttctttctttccttctctctttctctctctttctcctctctctctctcttactttctttctttcttttagaaggagtctcgctctgttgcccaggctgctggagtgcagtggtacaatctcggctcattgcaacctctgtctcccaggttcaagcgattctcctgcttcagcctcccaactggctgagattacaggcatgcaccaccatgccaagctgatttttgtatttttagtagagatggggtttcaccatattggccaggttggtctcaaactcctgacctcatgatctgccctctttggcctcccaaagtgctggaattacaggtgtgagccactgtgcccagcctttttttttttttttttcccaaagagacagggtcttgctctgtctcctgggctggagtacagtggctcaatcatagctccctgcagcctcaaattcctggaatcaagcaataatcatacctcaacctcccgaatagctgtgccctcagatgcacaccaccacatccagctaacttttaaatttttctgtagaatcaggggttcgctatgttgcccaatctggtctcaaactcctggcctcgagcaatcctccaacctcagcttcccaaagtgttgagattacaggcctgagccaccacacccagcctgatttttttaaaatgtgcttattgtccagttgagtatcttctttgaagaaatttctattcacatcttttgcccagtttttaattgggttatttgtcttttttattgagttctaaatgttcttaatatactctgcatcttagactgtactgagatattattatttcaaacattttctcgcattctgtgtgttgtctttttgttttctagttggtattgcttgaagcacaaaagttttaaactttcatgtagtcaaatttatccatttaaaaatcttttgtgtattattattattttttttttgagacacagtctcgctgttgcccaggttgaagggcagtggtgcaatctcagctcactgcaatctctgcctcctgggttcaaacaattattgagcctgagcctcccaagtagctgggactacaggtgcatgccaccacacctggctaaattttgtattttttgtagagatggggtctcaccatgttggccaggctgagctcaaactcctggcctcaagcaatccacctgccttgacctcccaaagtgctgcgattacaggcataagccactgcacctgaccaattgtgtattattcttgcaacatttctgtacatctaaaattatttcaatgttaaaaatgaaacattacatataagcatgctaaaaagtttagaaaactatgcactaaactaccaacagggaatagaaacagaatttttcattttctattatatgtttttttcctgaattatacaaatgatgcaaattctctgtagaaattttagagattaacacattagtaaacctaccatccaaaagtaatatttttgagatttgagacttcaaaaccaccatatacattattagcacataaataaccatttatatattcttacacaaatatatcaacatttataaaatctagaatcacttgttttatggggagggaaggccatgtcaataatgtaggaggatggatggcccatggactaacaaaaatttctgttgtcaatgtttgacaccaaggggaagtgcttgacttgggctgttcaatgggtgatgcttgagctggctttggaaggtgaatgctctagtcaaggaatgtagatgctgtggtgatggaaacacttgatagtcaggtgggctggaggtaggaaggagaaggtaaagctggaggatactttgagtttttgtttttttgagacagggtcttgctttgtctcccagcctggagtgcagtggtgccatcacaactcactgcaactttgatctcctgggctcaagtaagcctcccaagtagctgggactacaggtgcacaccaccatgcccagctaagttttgtattttttgtagagacggggtttcaccatgttgcccaggatggtctagaactcctggactaagggatccacccacctcaacctcccaaagtgctgggattacaggcatgagtaactgtgcccggccgaggatcctggattttgaaggcccctggatgacagtgaatgtgatgctgtaggccacggggcttccttgaagagttctgggtaaggatgcagtgtggtaagctttatatttcagacagttcatgaagttgtgtggaggacagattgggggaatgggagcgtgaaagccagggacaaagctgggcaactattgaaatgtctataatacattttatatgctgactgagtacaaacatagaggtgaccatgtgtcttggctggctggagacaattctagattacagcgttggtcccagagtaattatattaacagccactttcatgctcaaacatgtctcagtctgaagattaaatatcatctacatacacacaccaacaaaacttccacaattcttacctttactatgtgaaatgcactgatattttattctgtttttttatttttattttttattatttttgagacagagtctcgctctgtcacccaggctggagtgcaacagtgtgatctcagctcactgcaacctctgcctcctgggttcaagtgattctcgtgcctcagcctctcaagtagctgggattacaggcatacgtcactacgcccagctaatttctgtatttttagtagagacggagtttcagcatgttggccaggctggtctcgaactcctgacctcaagtgatccgcctgcctcggcctcccaaagtgctgggattataggcgtgagccacctcgtctggctttttttttttttttttcaaaaaaatgttggttgcaacctattaaattgatttcgtgacacactagttcataaccctcagtttgaacaactctgacctagacgcctgccaagtcttgggaaaataggaaggagacagataattaagtttgggagatgcatagtctaaggccagggttctcaatgttggcagtgcaagatcacgtgaggtacgactgaacacggagatctccaaaactgcggagagttttgcgtgtgaacgtatgcacagacatctacatggaaatggctgtaacgcatccagccataaggcgtacgagggtatatatacttacagagttaagaaccactrttctcaggagttatatgacagcctgggaagacgcccaggatgtaggaacagggagcaggcgagcgtgtggcaccttgagggtgctccgcgcgtctccgtaaagccaacgagcccctcctcttcgctggcctctccggggccttgctgactagtggtcgaagccacaggaccaggtgcgggtggccagcgtaacccgggcagccccgctgcttcccctcggccgcgccaggacgctcggcacgcggcgacgacggccccacagtgccccgcgcgcgcaagcgcaggctgcggctcccggcgtgcagcttggtggcggctgagccggcagcgggccgcctcaggcagccccggccgggccgcccgggtccccggcagcggggtaggatggcgctaaagcggatccagaaggtacgmactttcccaccctccaactctttgggtgtccgaagcgtcgaggtgtgggcggggcgccgctgccgtgaagtgaaaggtgacggaggctccgcgagtcgcggatacacctgcctgggaaggaggcagaacagcctcccgcgcagcctgaaaagcgaacgcagcctgagaaagggattgcgcgagcgcggggcggggccgggccgtggccacgagggctgcgtcatgcgggcggggcgccgtggggccacctgcaggcttctggacagcgggttccccctgtagggtatccagaagggctgggtgggtatccagaagggtatccaggaagaagctgggtcctaagggatgagtaggaactcggcaggtggggaaaaggggaaaaggctttccctgcaacggggagactacgaggcttggaggactgacagggtagcggggaagctgaagggcagatggtgtggacttgggtggtccttaggagcagtgctgaagtaactggtttttatcctgcaggtaagagggagtccatgagggtttaatgcattcactagaatttggaaaacgcacaacagtagaagaaagaagtatttctaattctatcactttactatttgttaacattttagcatacctaccttcagttttttttctatatttaaaacaattatactgcattttgtrttccacttattcacataatagtaaatgtaagcatgttgtgaagtagtatttataactttttttttttttttttttgaggtcttgctctgtcgcccaggctggagtatcgcccaggctggagtacagtggcacaatcatggctcactgcagcctcaaccttctaggttcaagtgatcctccctcctcagcttcctgggtagctgggactacatgccaccatgccagccaattgtttattttttgtagagacagtgtctcgatatgttgcccaggctggtctcatactcctgggcttaagcggtcctcttgcctctgcctcctaaagtggcrggattacaacgtgagacaccatgcccagtcctataactaatttttaacattaactttycacaagtacatgactagtaacttatttagtcattacctgtagtaggtaaaagtatggacttgggtgtcagacagacctgggttagagaatgtgaggtcacttatagtgggaccttgggcaaggcactttatcattcctagcctcccagtcctacatgtttacagagttgttttgagaattaaatgctatgaaatgtgtttagcacatgcttgctgtataccaaacactcaatacgagttagctgctgttattgttcaaaattcttcactaagtatttgctgttacgaactgtgtattagtctgttttgtgttgctataaaggaatatctgaggctgggtaattaataaagaaaagaggtttatttggctctcggttctgcaggctgtacaagaagcatggtgccagcatctgcttctggtgaggcctcaggaagcttacaatcatggcagaaagcaaaggagaagcaggcgtgtcacctggtaagagagggagcaagagagatgccacctcttttaaacacccagatctcacatgaactaatagagtgagcactcacttattattgtgggggggccaccaagccattcatgaggaatccgcccccacgacccagatacctcccactaggccccacctccaacactggcgatcacatttcagcatgagatttgggggggacaaatatccaaaccagatcaaccatcattgtacaatgagccttttccttaattcacattactgggtttgattgccagaggtggaattacagratctctgagagtatgactcttttttttttttttaaataaatagctgtccaaaagagagataattctgatgagttattctctgaaaggggtcatctgtcatcctaggactttgaagcaggtgaatgacatgctgagatctgtgttctaaaaagatctttctggcagcagtgtggccggaagtgggacagagggagactagaggctgttgtgaaggttcagtagaggctttgtccaaattaatgaccatggaatggatgctaggccagagcagtgcctggaccacattgcagaagtggaattgacaggactcgaggagaggatgtggtgaaagtgaaacaaggaggtgtacaaaatgggtcacttagtggatggtggtgtcagtgtctaggatggggaatcagaagttttgaaggcagggaggagggtaggagagattaaggaataaaggtttgagcctacatattcaaatgtgtaggctgataagatttataaaagggagcgtttggaaaaacaagtttgggccttgagcatgaaatgtcaactatagatccaaggtaattgaaatcataaggccagggagaacttttccttgataagaatcaaggacaggctgggtacagtggctcatgcctatatcccagcactctgggaggccgaggcaggtggattgcttgagtccaggagttggagaccaactgggcaacacagcaaaattccatctctactaaaaataaaaaaatggccgggtgaggtggctcatgcctgtaatcacagcattttgggaggccaaggcgggtgtatcatttaaggtcaggagtttgagaccagcctggccaacttactgaaacctcttctgtaataaaaatacaaaaaaattagctgggcatggtggtgcatgcctgtaatcccagctacttgggaggctgaggcaggagaattgcttgaacccaggagtggaggttgcagtgagctgagattgtgccactgcactccagcctgggtgacagagcgagactctgtcttaaaaaaaaaaaaaaaaagtaaataaaaattaaaaaaaaaattagccaagcgtggtgacacacacctgtaatcccagctacttaggaggctaaggtgggagaatcacctgagcccaggaggtcaaggctgcagtgagcctcaccactgcactccagcctgggcaaccagagtgagaccctgtcttaaaacaaaagcaaaacaagaatcaaggtcagggctggcttcatgtgtgtgtgacgcattcactctcacagggccccaggcttggatgggctctgcctttggttttatgctctgctgtcactatcaggaaattcttaataattatcgaacttgagaccctacattttcacattcacaaggccctgcaaattctgtagcaaktcctggggaaaaacaacagaattgtaggaaatacaactttaaaagtgtgtcaagcctgccgtggtgagatggcaccattgggccaccactagttaggatgtcttggctgcaagtgacagaggctgagctgcccttgtgcatggaattggaggtcctgtggcaggactttgggagcaactcagtccccctctcctggtctgttcctgtgtcactctgggctgaatggctctggaacacacagcctgctggacatctgggagtaatagagacaactgcttccagaagaactgataagaatattctcagaaagcccagcagatctttttttccctttgccttgttatgaattatgtctcatgctcattccgaaaccaatgagtggcaaggagtctggttactcttagacctggagctgacagtgagttgaccagaactgaacagcagtccttcagaaaggaggaaggcggatgggtgctgagcaggtagccagcagtatgcaagcctgagccaggtgtgtggtgtctactagctgcccccttagtttccaatccacagccctttctaaccaacttcaaccctttaaaaaaatgttttcaaatgaatgtttcaaattgaatatttttagatgcacttkttagttagttagttagttagttagttttttgagacagggtcttgctctgttacctaggctgtagtgcagtggctcaatcatagctcactgcagccttgacctcctgggcycaagcagtcctcccacttagctttcccagtagctgggattacaggtgcctgccaccacatctggctaatttaaaattttttgtagagagtggatttcaccatgttgcccaggctggtctcaaactcctaggctcatgtaatcctcccacctcagcctcctaaagtgctgggattacaggtgtgagccactgttctcaaccaggacagggttatatgtggcagcatttcaattttttaatggttttttttctctttgatacgtgtattagtccattcttgcattgctgttaggaaatacctggccaggcacwgtggctcatgtctgtaatcccagcattttgggaggctgaggcgggcagatcatctgaggttaggtcctggtcaacatggtgaaaccccatatccactaaaaatacaaaaattagctgggtatggtggcatgtgcctgtaatcctggctacttggaaggctgaggcaggagacttgcttgaacccgggaggcagaggtttcagtgagcgatcatgccactacactccagcctgggtgatagagtgagactctgtctcaaaaaaaaaaaaaagaaaaaaagaaatacctgaaggctggatgaggtggcccatgcytgtaatcctagcactttgggaggctaaggcaggtggatggcctgagctcaggagttcaagaccagcctgggcaacatggcraraccccakctctacmaaaaatagaaaaaattagacaggcatggttcttggcatgtgcctatggtcccagctactcaggtggctgaggtggaaggatcgcttgagccagacagaggtggaggttgcagtgagccgatatcgtgccactgcactccaacctgggtgacagagtaagaccgtatcttaaaaaacaaacaaacaaacaaaacagaaaacctgagatgaggtaatttaggaagaagagttttaattggctcacagttccgcaggctgtacaggaagtatggcactagtgtctgctctgcttcagaggaggggaaactcacactcactgtggaaggcaaaccggggtgggggggcggggggggtggcagagcaggcatgtcacatggccagaacaggagcaagagagagaacaaggggaggtgctccacacttttatttatttatttatttatttttgagacagggtctctgtcacccaggctggagtgcagtggtgcaatttctgatcactgcagcctccgtctctctggttcaactgattctcctgtgtcagcctctggagtagtgtgtgccaccatgcctggctacttttttttgtatttttagtagagacggggttttgccatgttgccaggctggtcttgaactcctgagctcaagcgatccacccacttgggcctcccaaagtgctgggattacaggcatgagccactgtgcctggccatgacacacttttttttttgagacagagtcttgctctgtcgcccaggctggagtgcagtggcacgatctcggctcactgcaagctctgcctcccaggttcacaccattctccagcctcaacctccctgagtagctgggactacaggcgcctgccaccacacccagctaattttttgtatttttaggagagacggggtttcaccatgttagccaggatggtctcgatctcctgacctcgtgatccacccgccttggcctcccaaagtgctgggattacaggcacaaagtgagccactgtgcctggcccatgacatactttgaaacaaccagatcttgtgagaagaggataataccaagtggattgtactaaaccaatcacttcccaccaggccccaccctcaacgttggagattacaatttgacaagagttttgtgtgggaacacagatccaaactatatcaatacatatttaacacatatattttgcaatacatgtactttaaagaaaatttggaaaatacctggctaagcagggtggctcacgcctgtaatctcagcactttgggaggccgaggtggatggatcacttgaggccaggagtttgagacaagcctggccaacatggcaaaaccctgtctctcctaaatatacaaacattagccgggcatattagtaggtgcctgtaatctcagctactcgggaggctgaggcataagaatcgcttgaacccaggagatggaggttgcagtgaaccaagatggcgccacggcactccaacctgggtgacagagcraaatcctgtctcaaaaaaataataaaaataaaatacataataaaaaaataataatagaaaaaaagaaaattaaagaaaatttggaaaatgcccccaaaattcagtttttaaaaaactcatctctagtcatctaaagtggggtcactttttcttgctggaatgtgtgccatccagttcccctcctgggggcaacaaatgttaaagtatatatatatatatatatatatatatatacacacacatatatatacacatatgtatgtgtgtatatatataacatatatacacacatatatatacacatatgtatgtgtgtatatatataacatatatacttatatgtgtgtatatacatatacgtacatatatatgtgtgggtgtatatatatatatattctacctattcatgtaattgtagttaacatttttgtggatttcttttcagtgcctttgatgtgtatgtgtttcagattgttgtcatgtagtgcatcaaattttatactctgcttttttcttgcccttttcctctaatgttgtatcatgacattttctcctgttattctgtagtctttaaaaactaattttcagtggctgcataatacttggtttagtttctcaaaaaaaagtttagttaacttctgattataaaggtagtaattgttctttaaagaaacttggggctgggcgtggtggctcaggcctgtaatcccagcactttgggaggctgaggcaggaggatcgcttgaggtcaggagtttgagaccagcctggccaacatggtgaaactcatctctactacaaatacaaaaattagctgggcatggtggtgcrttcctgtaatcartcccagctactctggagggtgagacaccagaattgcttgaacccagtaggcagaggttgcagtgagccgagatggtgccagtgtactccagtctgggcaacacagtgagaccctgtctctaaaaataaaaataaaaaataaagagaacttggaaataagataataccatattcatctacttcaagatgaatattttttcaaatgttcacgtctctgaaattgggatgcttcttacaatagctgtcagccaggttaccttcacttagatgtcactatctgtatgagtaaaccatcatggcagttcattatgaggtaagtgcattgctggtactatatttgttgagtttaattgttttaaaaatattttcaaaaagatagtgtgatttagcactgaaaagaaaagcttttgtgaacacaggcacagaaacaggacaacgacgagtaaatttcataataagggagcaaatatttgttgttggaggaaggactggaatttcctaattccatgtcaagcaaccaaattcttcatagccacagaaaggaaggtaccacctaccctcaagttggtgagactgggtcatttttttttttctggaatacgtgcaaatagattgtgtrtcatgggcctttgcagaataagtattcatggcttgaaagaaaactccagraagagtagtagaggactctaagaattgccacattaccattgttttggaagacacagaggatgatattgtgtagacatcaatgactcagtgttgggctctgaatgggaagaaactttaggaatacctgaacaaaccagtttatttatttcacttgtttttccttttttttttttttgtattcatgaatgatacttaacaagaaacacacaaagctatgtttaagcctaaaataattcttttgataaaagtaattttaattttttaattttttgaaacagaatctcactctgtcacacaggcgcagtcttggctcactgcaacctccacctcccgggctaaagcaattcttttttttttttcccacaagaagaaaaagtacattttatttaatgaccaagtacacacacacattcacacacatgcatatgtacatataactaaaaaaaatwttttttctcatcacatgggatgcattgtgaaatattctacattctttcatttaaagaaaaatgctggtcacgttttagtaaaaatctttcacaaatcactaatatgttacaatgcataactgctctagagcattaacaatgctaagctataattttagggaaatatatagtggtgctccttcttagaattagcccatgtggtattttaggtactcaactcagggaaaaaaaaaatgtaacatagccttgttaccatgtattcagcctggacatggtacatgctttcagtgagcttaaatcacctatcttcctaggcccaagatctgagggaatgacttccaactacgtaacaggaccctttgtctgtattatacattttatatgtctttttatgtacattgtttcacttgttcctcacaacaaccctgtgaggtagggaggggaaaatatcagttacgctttatagataatgaagttaaggttcagagaggttaagtgactttctcagttacctagtaaaaggcagagacagaataagaactattaacttttaggttgggggcccttttctctaaaccacatagctttggagagtatattctaacccaaaatatttttactgcttcatcctcattttcttattattaattcaactttttacagaataccataaaagacctaattctaaattcatcatgctaaatttatgcttctctgtaaacttatggccacagaatacatatttttttttttggaaagcactgtcactttggccctaaaggaacataagcaatataaagggccccagaggccaaggaaattgaagagaagtcagaagaagggatataaaatggaatgtgttaacggattttagtccctttaagtttgcacttttgtgagagggttcaatggaragctttaatgcagatgagacttgaagcttttgaagaagatctaagtcttgatgaggttattcaaactcagatcttgaacgcataatgatgataggccatggtcttcaaaaacgtggtacttgatgctctcccacagtgccaggactggaatgtcacaatacatatagattcatgtttttgtccattaatggtctgtgggtttctttaaatgaagcccattttagagtccatagatatcagtgttctgcgaaactgttggggattggaggctcccaaaagaccccagatgctctgccctgcccatggcatcaccctctaaagcgattcttgtgcctcagcctcctgartagctggttataggcacatgccaccaagcccagctaagttttgtatttgtagtagagacagggtttcaccatgttggccaaactggtctcgaactcctgacatcaggcgatctgcctacctcggcctcccaaagtgctgggattaccggcatgaaccactgtacacagcctgataaaagtaatttttaaatacaattaaagtttatgtgcaaagaaagcatttgtgttagtttatttgccagcatgttttttttttcctaattgtatgtaaagtaaaattgtgtcttataaaggatggagtcttggagttgacgaaacaccgtaaaggaataactgagtgtgtaccatggtttgcttaactcttctctactactattcaatactttaacttactttctctttttcggaacttctcacttttatcattgttacttgtaatagtaattactatataaacttaatctacttaatcctttacaattaataaaatatttatatatttaatgatttggtaataaattcccatggttcaaaatgtgcacaggatatacagggaaaagtctcccacccaagactgtccctagccatccagttcccctcctgggtgggcaaccagtgtcgaagtattcttctagaaatatatatattctacttattcctctccctttttataatactaattgtagcattctctataccactattatcttgatatttactgggtgctcttgcttacattatatacattaaaaacttacatgcaaaatttgtagccacacaatagtaccggcaagttggcaggcaagtatgattacaacttaacaggtaattacactgaggcccaaagaggtgaaagtgatttcctcagtgacggagcttggattcagacctgagtcttctaaccctgaggtgagcacaggaattcgatgtgtgagtggactagtttstttcaagtcacaccattcttccttgaaatgccagttagtattcgaaactcctgggtgctggttggagtctaacaatagggatccayacgtggcctttcagggatcattaagtgctggtgtaactgttcatcacacctctaaagggggaacatggattctgcatataggcagtgcaaaagcatagaggtgtgggaaaaccttgtgaggtggaggggaattggtctgtactgctggcttttcctgcccctggctgttcatataacctcttcaggatttgccttagcagttctgtcatagggctaatttatccatgcagtgtagcaatgaatataaacaattctcctgcacagtgatagtggaggtgctgaggggcacatagcagagaggtaagctaaaaggaactgttccacagagatttctgtagctcttgcatttctgagcctgtccttggtccccttgtatgacctcacttgttccccaagttaaattmtcttttggccactcctaatgctgcttcctgagtgcttgccaagtataattcattttacttatgaggaaatgggttcagatatattagatactaatcgagaattggccagtggtatactggtagatgtttaaagatcaaccctcggggagaaaacatggccctgatttgtagcatttgctggcttctgtgatgttaatacttccatcttggctgattaaatttgaagtgaaggggataaatgcaggatggccagagatgtggttactgaaatgatcagcatgtccagagacatatggtgaaatcaggagagtttgtgtagataggacagtgtttggcttagttcagggttggtgtcccataaagggaatctagtcgtggtataatccctgatccccactggtgcagtgttaaactttggctcacgtgccaaagtctccacattcagagccctaggacttgccacataaccagtggtgactagggtgattgggatggtggttggggaggtaaagtagagagattagcacttccttggtgctgcttccatgcattaattcattagcctagcagtaaaacctggcacctatccttctcccagaactctctcctgggctgcttttcttccatatcttcagcacctgggggcctggggatgtcctctacctgaggaggtaggaggctaggcttgggggtaaggcagagctacatgtgactgacttcttgccctgccctcttccagctctgtaccttgagtaggtaacttcatcactttacaattcaatttcctaatgtataaaatggaaatgatcatacctacttctctggtatctttgtagcagggagtagagtcctatgacccaccatgtctctaaccccctcctgaggcctaggagcctcctcccaccaggagaattccttccagctaccaagattggtatgtagaggcagcatccccagcatacagcagctctgacccactctctcatgttctaggaattaaccgacttgcagagggatcctcctgcccagtgttctgcaggacctgtcggtgatgactgtaagtattttggggggcttcaagttgtaggagcattttaattaagaccccccaacttaggccaggtgcggtggctcacgcctgtaatcccaacactttgggaagccaaggtgggtggatcacctgaggtcaggagtttgaaactagcctggmtaacatggcgaaaccccgtctctactaaaartmcaaaaattagccgggcrtgctggcrcatgcctgtaatcccagctacttgggaggctgaggcaggagaatcgcttgaacccrggaggcagaggttgcagtgagccaagatcgtgccactgcactccagcctgggcaacagactctgtctgaaaaacaaacaaacacaaacaaaaccaaacaaccaaattatcagccaagcagtatttaagaaaaccaatcaatgcttttcccttcattttctcttgaatggcttttcatttgaggtctaggccatgagttcacagcagcttggctggtcagcttatactcaaagtagaacctgcactgcctctcatgtcccatagtcaccgcttccctcttctggcgcatgagaaagccagcttggcctgaggagtcacatcagctgctggaaagtgcccttggccaagtcaaacttgggtgctggtgtaaatattgttggagttggtctagaggacctggtgctgctgcagctcctgggagcagagcaggacagtggaggaggggcagggcagggtagggcagtggccacttgcctctgccaaggggaagggcagtccctattattttctcccacttccactcttccctggcggagactgaagcagcagctctgggcagcttcttgggagagagagggagaagcagcactgcntgttccaggcctctgctgtccctcacaggtgctggccgaggctgagctgcccagcactagggtttccaggtctgtcctctgcccactcaccttgcctccactttgtgggcttcttgggctctgggacaccaatccttccctgtgaggcttcagtaactgcagccataggaaaataggtggggaggggagatactatgtgttcaaggagagtggtgtcagaggtacatataccaaagaatcaaaaacagagtgagacagaatgtgtatgccaatgttcacggcaccattactcatgattttcagaagctggtaacaacccaagtgcccatcagtggatgacagataaacaaaatatggttctgatacacattacaacatgaaaacatcccaagtgaaataagccggaaagaaaagaatgaatatatgattccacttacatgaaatatctagactaggcaaattcatagagacagacggtagatgagagattacctgaggctgatggggggtggaaataggagaaatattgtttcatggatacagaatttgttgggggtgatggaaagctttagaaatggatgggggtatggttctacagcattgtgaaggcatttcatgccacagaattgtacactttaaagttgtttaaattgcatattttattatatatttttaactacaataaaaagaaatttcacaaagctggaaaaaaggagggcatggcatcatatgtgtgcctgcatgtcctgggaggggactgagcttagaggagccagcggtaggcagatggagccactgaaaatggaggactctaaaggctttatgtgggagtttaaatctcatttctggagcagagcagaaatgtttcccagctgcctatgcagagtgtaagaaacaagaatgactctgctccactgtctcctggtacctgctcatcactctgctccccactaatcagtgtttacctcatgtcgtcctcacaagcaccccaggtctccatagcatgcttcccctcttacctgtcacttaagataatatcagattaaactggggtcgctgtaagcttgaactagttcttgtttagccttacctgtctagaggcagctccttgatgctcagctcagctcaaatttaccttgcaccagagcccagtgctaagagaggctagcatcaaggctagccaccacagtcagacctcagtggatgaggttcagacagcactggaagctagcctttggggccatttcacacccgcctcatgggctcacagccatttccagcatccctcctgtatatcctttctcgtcctcttgcttttggggccttctcttctgactctgctctcaagcactgcttagtgtcccagcagccctcagggttaaagtgaacaagaccagaggattctaaccttccgttctgaaatatattatcaaaacacttttatttaataaagaattccattcacattaatgttaggcaaaatatgtctactttcaactaacgattagcatgaattggaataaaaacagtcaaaagcaaaaaaaagtgatatttttattaactcaggcaggcttattacaggtaaagktgttcttttcagcaccatttctttgaaatattgaaaagggctcatgggccaccttgactacttttgaacacctctaggggcttgggaaacttctgctttagtccctgcacttgtgctcccaccccaaaccttggtgctttcctaggcctcctgttgtgtagagcctgtggggtacttaaacaggtgacaggaaacccaggacaggaccaggtctgaaactctgggctaattccatatctactatgaatccatatgagacagaattctcttggtaataacaggcccttcagatgatcccagcaacccactcctgtgggtgagtaggcattttccaccaaggccctagagtcaatatccctgggaccatttgtatgacttgggagccttgaatgtgagtgtttgggccatactgggctagccttgctgatacacaggagcttttctgggaatgggtagagcagtgaaagtcacctgagatgctggagagggtgtgmtgtgcagcaagagggggctctaaactctcaccaaatggtggtgacctggaagggaagcatgagaggggctcatcgtgaccttgttactgagtgcctagagcacagggcactgcccaggggttgggcaggagaggactcagatgaaggcagcacccttgaggctccagggccacgggcagttggctcctgagagacactctttgaagagggcttcacaatgaatcaggagaagaaccaaggaatagaagggtttataaagagcaataaggaaaatggctgaagcctagccaaggcttaattctgtgcaaagaactgactgaattgtagttactggcatttgtgtagtaaagaatttaatcttggctaagcacagtgtctcacgcctgtaatcccagcactttgggaggctgaggctagcagatttcttgagcmcagcctgggcaacatggtaaaaccccatctctacaaaacaataacaacaaaaagaatttaatcttgtccccaaaagatctggccttcatccttaacacgtagggggcgatctgtaagataccatacctgataggaatgtctttgtttggctggaagctttaatgcacaccaacaatgtgatttagggtgaggaatggccataccaagtagaccagccatgtgatttcaggtgagagcctagcccgggcaacatagcaagaccccatctctacaaaaatgaaaaaataaaagtaaaaaaattagccagatgtggtggcacacacctgttgtcccagctcctcaggaggttgaggcagaaggatagcttgagcccaggagtttgagactgcagtgagctataatcatgccactgcccaccagcctgggtggcagagtgagaccatctcaaaaaactaaaaaataaaataaggtgggggcttggatcatgcctggaggagctggagactggagcctgagatcagtcctatgggcattcaaataagtcagtcatgctctcagggtggagctccaatgagaattctgaatacggaggctccagtgagcattcctgattgggtgttctgtgtgtgttgccatacagcaatgccaggagagtaacacatcctgactccayggagagagaagaatagaaactctgcgtttggaccctcctgatgttaacctatgttgttyccctgtgataaccagcaatcttaagcacaaccactttcagtgagctctgggagtcctaggcagttattgcatcttgggtggtttggggaaccccagtcttgcagttggtgtcagaagtgagtgcatcttgtgtagacagtgcvctgtaatttagcagtgcgttttcagtagaatgacatgtttcttggggggtctcttacatgcccgtctctcttttgttttgtagtgttccactggcaggccaccatcatgggcccggtaggtagtagctgckgagcgcaccmctccagttttgcttcttgcactttgggcttagcacatgcactgatctctttctgtgtctcatccttccagaatgacagtccttaccaaggaggtgttttcttcctgaccatccactttcctayagattacccgttcaagcccccaaaggtgaggtccctctcccaactcccctgatgtttggatgaaggacagcatgtgacaaggggcccttcaagtcaggtataggtaaaaagagctgtacgtggggtttctctgagggcccactgctccaccctgtggtgagagtttcccaggactttaattactggactttgggaattagcacctgttgtgatcaagggtcagtggggtgagctggtgctggccttactgaggccacagtttgaatgcttctccttgtgactgtagctgagtctggtcatgtctccaggctctggctcccttctctgcagtcccttagagttaggacaggggttctcagccggggtgattttgctactgccccagggacatttgagcaacatcttaggatattttgggttatcaaaaccgtggtgagggagtactactggtatctagtcggcaaaggccagggtattccagggattccctgcagtgcacaggagagccacccttcccatgacagataatgatcagccccaagtgtcaatagtgccaaggtggacacaccctggtttaggactggtgagtcacaccttcacttttctttattaagttaaaagaatagcaagcctcctttgcccttcatgcacacaccatcccatcagtggagctttagagagcagtgccaccaaagggaaggagaagcccagggagctgcctcgaccaccctgccctagcatgtcttgtgcaccgcaggtcgtctcactccctggacccttggacctcgtactccttctcacctgggctctgcatgggtggccgagcctgccctgaggctcatagtcctgtggaggagacagggcatttagcatgtgagctactcagcactgggaaggagcacaagcagtggttggcagcaggagccagggtggtggagagattgccctgagaaaggggaactgcaggagctcagcaagagggcggacaggtccccaggaaactgccccaggggagtgagcctgtgaggagttgggaaggaggccagaggggtacggatggccccaggagtagggtctgcacgccgttgtggggatcgccacaccgacacaatcactctgctgccttgtggagaaraggctggggttcaagtgattctcctgcttcagcctcctgagtagctgggactacaggcactcgccaccacatgtggctaatttttgtgttatttttagtagagacagggtttcacaatgttggccaagctggtctcgaactcctggccttaggtgatccacccacctccgcctcccaaagtgctgggattccaagtgtgagccaccacgcttggccaggttgtgcattttgtcaagacttactcgaaagtcctgcatctgcatcagaccccttagctgaggggttgtgatattgctrtgtcttactaccttgacttggccttgatgcctcaatttgagtcagaggcttagctgctgttttgcatgttgtttatctgagtcaatgtgaagaagccccttctgtgctcaccagctgcagctctgtccagacatcgccaccagaggctacctggtgcctgagcattttaaatctttgttaaatatgcttaggatcccagagaccttttaagcttttrgcaagggagtggagtgtgctgagcaggacaatgacagatgctaaaatagcttcaccacattggagtacaactgctgttcaagggagtttggttgaaaaatcataagcatgcttcatggtgctgtgatccaccccttctcccttcccctctggagagactgtggcagagtcttatcaagtagtaattttctagcttgtctctttcattactgtgtgagcagctgaggattttccttaaacagataccaatgtagtcctgaatgtctgttgggcattttcagcatacctaattgcctaaggacaaaggagaaacagtgattattattattattttttaattattattattatttttgagacacggtttcactcttgtctcccaggatggagtgcagtggcacaatctcagctcactgcaacctccgcctctcgggttcaagcgattcttctgcctcagcctcctaagtagctgagattacaggcacccgccaccacgccggctaattttttgtatttttagtaaagatggggttttgccatgttgggcaggctggtctcaaactcctgacctcaggtgatccgcccaccacggcctctcaaagtgctgggattacaggcgtgagccaccgtgcccagccaacagtggttattattaaaaaactaagaagtaagctctgtgggtgagttgggattattttaacaaggagagatgtgagctgaaaggtgacagtgacactctatgagagaagaaagtgcttctgtcttttaaaaatctccttccacaggggaacaggagcaacgatttatgttttggcacaaattttctgacaataggaggaatctggcaagattgcatgatctttattggagatattgaggcagatacttaatgtctgcgatgattttgaagtttgacccttcctgggaaaaattacagatgttcaagctcacatgcacacaactctcttctcatattcgaaagtaagtttaaaaaaaactattaaaaactatatcaaacatgcaaaaaattgtagataatgatataaaggatgtttgtgcatcctccatctagactaagaagtaccagtgagttctcaaagctagcggaggaggcaaaatcccttttttttttttttttttttttttgagacggaatctcgctctgtcacccaggctggagtgcagtggcgtgatctcggctcactgcaacctctgcctcctggattcaagcaattctcctgcctcagcctcccaagtagctgggmktacaggcatgtgccacatgcccggctaatttttttgtatttttagtagagacgaggtttcaccatattggccaggctggtctcgaactcctgaccttgtgatccacccacctcaacctcccaaagtgctgggattacaggtgtgaccactgtgcccggccggcaaaatcctatgttcctttgccccagcccctgcgttggggtcactgctcacccagagggagtgtaggtgaggcagattcttaggctcctatagcagtacaagctgcacctgactcagagcaccttgcacatcacagacagcggactcttcatgggtcccacaacatccctgggagaggtaccatgtacctacttatagtgaaggctctgaggtccaaggtcatttgaagaagtaatgtgtggctgtggtttaaaaaagaaaaaaaaagtcaaatgtaggacagtatacagtagaaaataggaccttctttaaactttgtctctctagccacgcctggcccccccgccttttttttccataaggcattgagtcctacttgtcttttcatttctcttccaagagtaatctcaacctggataagcacttgtttgtgcttccttgtttttcccatgaatggaacagacctttccgtgaatctgcatcttgcttttcccatagcaatatatcttggaaattgttccatatgatcacattcatgttttaaaaattcacctcattctttttaaacaggtgtaatattctgttgcttatatataacattaatttaaccagtaatcaatctgaagacatttaggttttacatcttttgttacagtggttatccttacatatttgaagtgcacaagggtattttagggctaaattctgagaagggggggtcttagaaagggtgaagtagaaaggtggggagggtttgtggcctggcagagggtccacggcctgagcttctctttttcttttttttttattattatactttaagttctagggtacatgtgcacaacgtgcaggtttgttacataggtatacatgtgccatgttggtttgctgcacccatcaactcatcatttacattacgtatttctcctaatgctatccctgcctcagcccccaccccccgacaggccctggtatgtgatgttccccgccctgtgtccctgtgttctcattgttcaattcccatctatgagtgagaacatgcagtgtttggttttctttttttttttttgagacagagtttcgctcttgttgcccaggatggagtgcaatggcgtgatctcggctcaccgcaacatccacctcccaggttcaagcaattctcctgcctcagcctcccgagtagctgggattacaggcctgcaccaccatgcccggctaattttgtatttttaatagagatggggtttctccatgttgaggctggtctcgaactgctgacctcaggtgatccgcctgtctcagcctcccaaagtgctgggattacaggtgtgagccaccatgcctggcccagtgtttggttttctgtccttgtgatagtttgctgagaatgatggtttccagtttcatccatgtctctgcaaaggatgtgaacttatccttttttatggctgcatagtattccatggtgtatatatgccacattttcttaatccaatgtatcattgatggacatttgggttggttccaagtctttgctattgtgaatagtgccgcaataaacatacatgtgcatgtgtctttatagtagcatgatttataatcctttgggtatgtacccagtaatgggatcactactgaatcaaatggcatttctagtactagaggaataccttgaggaatcaccacactgtcttccacaatggttgaactaatttacactcccaccaccagtgtaaaagcattcctatttctccacatcctctccagcatctgttgtttcctgatttttaatgatcgccattctaactgctgtgagatagtatctcattgtggttttgatttgcatttctctgatgaccagtgatgatgagcattttttatgtgtctgttggctgcrtaaatgtcttcttttgagaagtgtctgttcatatcctttgcccactttttgatagggttgtttgattttttcttacaaatatgtttaagttctttgtagattctggatattagccctttgtcagatgggtagattgcaaaatttttctcccattctgtcggttgcctgttcactctgatgatagtttcttttgctgtgcagaagctctttagtttagttagatcccatttgtctattttggctttcgttgccattgcttttggtgttttagtcatgaagtctttgggcctgagcttttctgctgatacatcaacaaaacatcactgctttttgcataaaacttcctgggcttttgagtcctttccaccacscttgttattcctcagagcatactgctttcagggagatggtatcaatccccctrtgttcagaatgagaatccagcagggaatgggtcagggaacttctgggtgatcactcactcccatatcccattagagtttgggagtgggggtctggcttagcctgcactgtggggccaggtatgcagcacactccaggtactgcccagcagcagctgcttctgctttacttggttcatttcccacaygtccctgtggtttgtctgattggggatctcttgtctttgcaggttgctttcacaaccaaaatttatcaccctaatatcaacagcaatggcagcatctgccttgatatcctgcggtctcagtggtctccagcgttgactgtgtcaaaaggtagagatgctgatggcatgctctgtgtgctcttttacacatgtttttaccccagcactgactgagtggaaatggaagctcagagaaagaagtcacctttcccaggtcacatagccctgtccactgctgtgcccttaagtggatatccttacacgcctacgaggcagcaccagcagaactttgtgccccgctccctggcgcttctcagcagtcaattgccctggtgtgctcaagactgtcacatgggtgcaagaagaaaatactgattctacttatatttttttatccaaaaataagaaaggcaaatattacattaccttctctgttccctcatttattcatctaataagcacaaaacggactgtgagtcagccctgaaggaagatacagggcatgcctccgggggcctcgaagttggtggagaaatcctcccttcccaaaataaatgatgttgagcacatgtctttggttgaagttgaagaaaccagtctaaactgagcttagaaatgcagatattccttctgaattaagatgggctgtgcatgggctatgtatgcacgagagacctgaatgtagatggtgcagtatcctggcaggtggagcgtgggaggatggtgaaaaatcaacccaagagaaacagagcctggcctaaattttaaatttttctgtagaggagacagggtctcactttgttgcccaggccattctcaaactcctggcctcaagcagtcctcccattgtggcctcccaaagcactgggattataggcgtgagccactgtgcccagccaagtatcttaagaaaggcaaacctgcccctgtcatttgtagctttatgtgtggggacctgtggtcagaactttgatggactcactgaatccagtttgtttggaatcatatggtgagtcgaaagcaaagccaggaatgaaagtgtgcatttctctctgggaccccaagaatccaggcaccacaattccttctgctcctcaccacagccctagtgggtgattcccttcccctagggttgctgagagccacattragtgcacatcttagagayggtgctggcacagaggaggatgcatctgctttgcagttagaaggacctggttcagaatttctttwttttttttttgagatcgagttttgctcttgttgcccagggtggagtgcaatggcgygatctcggctcactgcaacctccacctcccaggttcaagagattctcctgcctcagcctcctgagtagctgggattacaagcatgcaccactatgcctggctaattttgtatttttttagtagagacagggtttctccatgttggtcaggctggtcttgaactcccgacctcaggtgatctgcctgcctcggcctcccaaagtgctgggattacaggcaagagccaccgcacctggtccagaatctcattttaatccatttattgggtgttccaagtctgtgaccttggacaagttacttgaatgctctgaattcttgtttccttaacagtaaacaggactcctaggactaaatgccagaggttcatgatgtagggtacagacaaggatgggagggcagttggagactaagatggggtgcttcagtggagaaggggaatgagaaccaggatgcacccaggagggaagtatcctagcacagcatgcctcaggccacacagtgaggaccacctcggctgatacatgggacggggcaagtggtgcatcaagcaatttagattgggctgttgaagggaagacaactgcttggtcaaaatacagagtgcaagttcagggaagtttacccaggggtgacccagcagcttcgtggctacagctgaccaaccttttcttttcttcccagttctcttgtccatctgctcgctgctctgcgaccccaaccccgatgaccccctggtgccagagatagcacacacctacaaggccgacagagagaagtacgtgtcctctttgggttgcctttgcaccatggctgccccaggcagctccatgcagtacctgtgctctgagctggtgcttctaggctgcaggttcccacagacatcttcctgcccatgctgagccatgtgcacagagggtgtgccctgggcttggactcctggctctctcactaacatgtcctttgagtctaaggagggaaaaggagataaaagcagttcccctcctggataactcattagctgctgctactgtatatgaaaacattgccaagccctgccctcaagaccagcaaaatcagtggtcagccaagaacagactcagaagaatctgacaacaagaaaaattctgatttaaattctagggtttatagcctaagacaaggggatgtctgcttggctataccgaaggtgaggctgagggcagtcaaggtgggaaacactgctgtggtcagttcgctggctcagctcagaagtcagcagtgtgttagaccttcattgccagctctctgtttaaacaccaattaacagacccagaattgtaaaattccgaccccctaggccaggcacaaccacatgcactgtagcatgagggtgtctgtagttggtggggcaggcacaaggagtcatcgccaagtgttagtctctcagtgctgacagcactgtgaaagaggcccaggtgtggcaggggccgcagtccagtgagtggtgtgaatctcagttgtggaccttcagggaaggtattgctagcccttttaaaagacatcttcagtgagtgcattcttcagttcattactcattacttcttttctgtctgaagagattagaatagagtatgtttttcccttttttttttgagacaaggtctcattctgttgcccagtctgaagtgcagtggtgtgatcacagcttactgcagcctcgatcttccaggctcaacctatcctcctgcctcagcctcctgagtagctgggactacaggcgtgtcccaccacacctggctaattttttgtagagacagggttttgccatgttgcccaggctggtcttaaactcctggactcgagcaatctgcccacctaggccacccaaagtgctgggattataggcgtgagccaccacactcagccacatgtttttttcaaattatatttttcttaagacctttatagatcttattatttccctcattggagttttctcaataacagtcaaaatttttaattgactgggtttgtttattttaacactttttacaagatattttagacataccaaaagtgattttttttcagtgcctcttgtaactataaatctctctaatttatagtctcatagcatcaagtgtcattacaatgatgagagtaagtgcacacacctgcatagtcttcaatggatgcctggcctgctccatgtgctttacatacagacttctctagtttccccacaagcacacaaggcagatactttccccatggcaagcaatcaaaaaagccaggacacagaggggcggaacagctgctgaggactgtactgatgcacaccccggtaggcagattcccaagcccttgttctggagtttgtgtgctggacggcctgtaactagtacaaactgacctttgtgtgtctcttctctgtcctccctgcatccatattgtaggacaggagaaagaaagggaggaagtctgttgcattattaaatcttccacagcagatagttatggagaatcaacagtttggggtttacacatgaggggttcacccagctgggggtttacagccatgtctgatgtgctcctgctccagggaaagcctttattccactcacccatcagccrtagatgtttgacaagcagcagcagcagcattccccacatcagtcctgttctctgcagcacattgaagggaagtgaccatttcaagtgagggtgtcacttcctctgcttttttattccaggtacaacagactagcaagagagtggacacaaaaatatgctatgtaagtgccttggaggttttacatgagacactgtccaagagaagctggcagagaggtcttcccttaaaactttgggctgttggctgagccattcaaagagcatcatctgttcttcaaacaaatgttggtcacccastctctccagctgcagcatgttggtgccattttcagcaattacggctttgacagtgccacctctttgatgccaaatcagcaaccattgttgttatgatctgcagtcttcctggtgacactggaatctctctctctgccgcctcagtttgtctgctggtctcttggggggccaggccctgcacgtctctcctacccggcctcaaatggtgctgctgcccatgatggtaccacaccagggcctcagcctggcccctcaccacataccctttgccttttagaactcagtgccatcctgggtgcccagggcagagcaggctttgttcgcacctcatctgctgcagaaccacatcctgaggagtctcagcttatcctggagggaattgggaacagtgtcamtgggaagtgaaggcctagccctgtggcttccaccagtctcctcctgcagtgccacgtggtggcatttctcgcctcacaccaagaagcagcaagtggaaaatttcaggatacaaagcacataacaccccataagagatgattatgttttyagaagcaagagcaaaattatgaaacctctagagatttgggtcatgttactccatttgatgaagattctcactaccgcccgctcctcccataggagcctacactaagtccaagtgtgagccattcacagactagaacacaaggagggagagagactcttaaacgtaaataaaaatgcaattcactcacaactctaaatgataattgacatttcagcctctttcttttaggcaaaacagaagatacacactattaacagttatttgaagccttaaattacaatagcctgttaggtgatcggctttctgccttggctttctgatgcagcacattttaagatttgcctttaaagctttgagccttgagattaggttagttaggaagaggacaacaaagggaagagattattctaataaaacttccacagagggaagaaaattgaggagcttcagatctctaaagccaaattcaacctgatctttctaggttggttataaagctggtccacttccaggaagtgatgtgtaggtgaataggaacaaaaggtgaagaagcagtaaaactgtgaccaagtggccagatggggcttttgccggctgattgaaaggaagtctacagacctaacataagcagtcagccaaaggtggctgtgggaggttgatttcttccagaaacttccaagttgtggctacaaatttattgccagatattttcccactgagaatactgaggttattcacataatcacttccttaacaaaggaagaagcacttttaacttgggctgcattccctttgtgagggtccacatttaggatcctcctgctaccataaggccccttttggggttctttgggtgtggctgcatctcaccatgttgaggattgccttttttttttttttttttttttttttttaacacagagccttgctctgtctcccaggctggagtgcagtggtgcgatcttggctcactgcaacctctgcctcccaggttcaagcaattctcctgcctcagcctcccaagtagccggaattacaggcatgtgccaccatgctgggctaatttttgtatttttagtggagacggtgtttcaccatgttggccaggctgttcttgaactcctggcctcaagtgacccgcccacattggcctcccaaagtgctgggattacaggcgtgagcccccgtgcccagcaaggattgctgttttaattcttgtatcttcgttgcttctttggtctttgcttaaacaaaacaataaagcttaatagttggggagaatgctgttaccagtgtcctctaggaaggctgttagcatatggctctactgagcagcagtgccatctggtgcctgagatcatgtgcttcaggcagttgtcacactgcatctacagccaagcatcacagaaacacttcactcatgtggtcagggaaggtgggactgattcacatgttagagacaggtcagatgggaaaattaaggcccaacttggtgttggggaataaccatactctggtctttcaagtgtagtagctgatgattcccaagaaactgatgaattttctgagtccagacaaaatttccccaagcctgctctctctgttggatatacataatagagaaagtcaaatcagccctttggggtttgtggtaaaaattcactcacccattgaagcctaaggtggctttgtaccttccagatctctcagcaaatcycctgggcagaaatgtcacctgcttgccatgtctttgaggggttcaggtcagcctggagaacaggctccttaggtcaaaaaccttgttttaagagccactgtggtacagtcaatgtaacccacttgtgcagaagccatgcttccaaggaaggtctcaggttgacaactagacatcaaatctgagaagccaactgtggagtaatgtgtttttttctctgtggacaagagtgatcagaaaggtgcttgatcttgaacaattgatccatgatgaaaaaatgaccattagctctcccccagaagcgtctgtgtttgctgaatggagctgagattttgatccgctatcagactccagaaagatccaggagttccaagaacatggcaaagagtcaaaatcttaggacaaggaattaaaatgccagaatgcaaatgtccaacaggcctggtagctcacagctatcaacaccctagaattccacactgcctcactgcagttgctcaaggatgggtatgtttctgtctctgaaattcgggaaaaagccttaagtgccagagaaggtgcttccaagactgtctgcagaattcctttcctagggtctgtctctggtacccaaaagggcagagaaggaaccctaagattagcatagagccactcatctctcctcccctccccaccccttcttcccctgcttccattccccatggctctctcctctgactgtgaaacacttcctctccagcagtgttgggaaagttctggacytctactggatctagccataaatggtggtcttcagaaaaatggagattgtggctgccagcacccacaagacagcagcctcatgccatgcaggcagcaagccatcctgaacagcgttcctcccagagtctgtttcctcacctgctgttcactggtgagaggaaaagggacttgttctcccttgaccagttttctagttttcctgttcccaccctggtctttgcctgatgacagagaaactttctaaaaaaaaacaaaaacaaaagctataaaaaatctgcaaaacaccctatcagaagtcaatgatttccttaaaaatacatctacttccttcctgtccttcttatcttctcccttgccccagacaggtgtgcttgcaggcatccagctgcctgcatcagagctccccttgaaggcaggtgcrcagctgggctccacgttggagggcaacagcagagctgccacttatagccggtctttcaaccctgctgtcccccagcccacccacaatggctcaaaaggctggtcttctgagaaagacttgctgctagccaatcatcacagtcactttccagttatgttaagtggcatcagagcattgattagcacttacggtatgcaagatatggtaggaggaaaagggaattatagacagaaaccatgtgaaagtwtaaaagtcactgatagactagatacacgaatgagaaacaaatcaagcattatcatcacagaaaaccaccaaatcgcaaaagataagaaagggatcaggcatggtggctcatccctgtaatcccagcmctttggaaggctgaggtgggagaactgcctaaggtcaagagtttgagaccagccaaggcaacatagtgagaccctgtctcttattaaaaaaaggaaaggaaaaaaatttttcaagaggaagaaagtaacaaaggacatataaaacatcagaaaccaattaacaaaatgacaggaataagtcctmactcatcaataacaaccttgaatgtaaagagttcaaacttcccaattaaaatatatagccttgtttagccgggcatggtgccacatgcctgtaatctcagctactcaggaggctgaggcaggasaatcacttgaacccgggaggtggaggttgcagtgagccaagatcatgccactgcactccagcttgggtgacagagtgagactctatctccaaaaaaatmcaattaaaaaaatatatatatacacacacataatacccttgctgagtgggttagaaaaacaagatccaggcgaggcatggtgactcacaactgtaatccccatgctttgggaagctgaggcaggaggatgtcgcttgagttcaataccagcctgggcaacagagcaagaccactagctctaaaaaaaaaaaaaawwagctgggcctcgtggcatgtgcctktagtcccagctactcgggaggctaagacatgagggttgtttgagttcaggagttgaaggctgcagctgagttatgattgccactgcactacaacctgtgtgacaaaacaagaccttgtctctaaaataaattttgtaaaatgaatttaacaaaaacaagatccagctatatgctgcctataaggaactcactaaaaagatgcatayagactaagtgatgggatgaaaaaagatattccactcaaatgtaaactaaaagcatgcaggactagctatacttatatcagacaaaatagactttaagtcagtcaaaaaacaaaaagagaaaaggtcattatataatgataaagggatcaattcagctagaggatataacaattgtaaatatatatgcactcaacactggagcacccagatatataaaataaatattactagagataaagagagagatagaccccagtacaataagttggggacttcagcacctactttcagcattggacagattatggtctagaaaatcaacatagaggcatgagacttaaaatacgctatagaccaatgaatctaagagacatttacagactatttcattcaacagctgcagaatacatattctcatcagcacatggaacattctccaggatagcccatatgttaggccacaaaataaatctcaacaaatatttaagaatcaaaatcctatcaagtatcttattagaccacaatggaataaaaagcagtatgttgcagcctccagaactgtgagaaacaaatttctgttctttctaaattaaaaaaacaaaaagcactagaagtaagtaacacaaggaactctggaaactgtacaaatacatgaaaattaaacaacaccatcctgaaagatcaaggggacagtgaagaaattaagaagaggctgagtgaggtggctcacacctgtaatcccagcacttcaggaggccaaggagggcagatcacttgaggtcatgagttcaagaccagcctggccaacatagcaacacccccatctctactaaaaatacaaaaattaacgggccaggcatggtggctcacacctgtcatcccaccactttgggaggccacggtgggcggatcacctgagctcaggtgttcgacaccagcctgggcaacacactgaaaccccatctctactaaaaatacaaaaaattagctgggtgtggtggtgtgtgcctgtagtcctagctactcgggaggctgaggcaggagactctcttgaatctgggaggcggaggttgcagtgagccaagattgcaccgctgcactccagcctgggcaacagagcaagactctggctcaaaaaaaaaacaaaaaacaaaaaaacgaaaaagatacaaaaattagctgggtgtggtggcgtgcgcctgtaatcccagctactcgggaggctgaggtaggagaatcgcttgaacctgggggggcagagccaaaattgtgccactgcactccagcctgggtgacagaatgagactctgtctcaaaaaaaaaaaaaaaaaaaaaattagtgccgggcgcggtggctcacgcctgtaatcccagcactttggaaggtcgaggcaggcrgatcacgagttcaggagttcgagaccagctgatcaacatagagaaaccscatctctactaaaaatacaaaattagccaggtgtggtggcgcatgcctgtaatcccagctactcaggaggctgaggcaggagaatcacttgaacccagaaggcggaggctgcagtgagccragattgtgccattgcactccagcctgggcaaccagagcaaaactccatctcaaaaaaacaaaaaacaaaaaaaacacacaaacctaaactgcctctgtaacactaatgaaaggccaccaggttagaaggatgagaggggcctgaatttgtagttaaatgattactgccattattccaaaggtcacaagatttacaacttcccccaataactcctgtaaataacatcactattgtggaacctaagattggccttttgagatgtcttttcaggcttttgcatctctgataactggatggccccagttagactcctgtggccccacccagaagcagacagcacatgaagaccattttccacagccctatgactgcaccccaaaccaattagcagcacccattccctagccccctgcctgccaaactattctttaaaaatcttagcctccaaattttcggggaggctgatttgagtaataataaaactctagtctcccatttagctggytctatgtgtattatactctttctctgatcttgatagatcagctgtatctgagcaacaggaaagaagaacccattgagtggttacaggacagccaacaggaaacttaaacaagaaaaatgggagcatgagagggataagggcgagggggtctacatagggcaggccacatcctctcctctttaaaacccatcagggtttccattacacatagaataaaacccaaagcccttcccttggcctctccttctccctgtgtcccacttctcagaccaattaagctggctcctacctcagaacccagtctctgctccagggttagttacctcctctaaggctttccctggcctatcaagctgaaacaggtttccatacactgcaacaggaagcagtatcatgctccctcaaacttctcaccactagagactcctccttatagtcttctctacatggagcttggtcacctcactgagctgatctaattccagaacacagagacctgcttctttggcctgcacaacctggtttcaggtaagggtagcttctcctcaggtagactaaaatttgaaaagtgctcccagacctcctagggcttccacctgggactggtggccaaacgggtgaaggaacctgacaactagaaggtgattaaataggagtattcccagacaaagaagagaaaaaaaggtatgttcaccaaagagaagacggtataagtaccataagactgatggccaaactcctctagaatatggagactgggggcagagggatgagggggcagaaagtcacctgagggtctggtctgaaggaaaaacaagcagagatgttactgaagtaaggggggaaaagactgaaaattaggagatctggagagcctctatttatgtaaattcactttttctaatgtaaacagtagtgaagtcaaagtagagaagtagggagacctgcactgtggaaaagagaaaagattgaaaagaagatccaggacgaattcaaaggaggggtgaagactgcagactggactgctaaggagaagagatattttgccacaacttgagacttctccaggtcaggatgaagtaactgttttcctctcagaaatgtcagagcttctgcctgtaagacaaggcagtggttcaaatgtgtccaccaaagttcatatcttagaggcttgatctccagtgtgatggtgttgagtggtgggaggtgggaggtgctgaggctctcatgaatggattaatgccattattttagaagtgggtttgttacccgagaagggtgtccaggttcttggtgtcatgaacaaagaattggacaaaatgcacaaagaaagcaaggaaagaatgaggcaacaaaagcagagatttattgaaaatgaaggtacacttcacagggtgggagtggcttgagcaagtggttcaagagcctggttaccgaattttttgggggttaaatatcctctagaggtttcccattggttacttgatgtacacccttgtaaatgaagtagtgcccacaatcagtctgattggttgagggaggggacctatcagaggctgaagcaagtttcaaagttacaccctatgcaaatctctgattgattgggaaaaggctgaagtgaagttacaaagttatactcctatgcaaatgaagacttggcccatgaccagcctcattggttgtggaaagggaccaatcagaggtactttcaatttttcatctaccatgcagaaaaaggttgggggtgggggttgcaaaggaagtagccaaacaaactctgactacaaacagaggtcccagtgggtagggggctggsacaaagcttttgggggagggggaggacagaggaccttgggkctgggggatctaagctgscccctcaataaagggcctcctcgccacctcccagcccactgtcccacctctgcccttggctctgttccttgcctccctcctstctgaccccatctgcctcctacaggaggagcccacccacccccaaacacctcccagygttctgggcccagctccttcccaggcctcactggtgcgactcagctccagctggaagagcaggtccaggaagtccttggccagcccctgccccaggaagagcttgagcaggttcgtggccacgtcctggcgacactcggtgctggttgtctcctcgatgagtgggatcagctgccctgggccctgcagggagaggcacgggggatcccraacctttccctctgaggacctcagagcatcccagggaaagaggacaktttcccaaggggtggctggggayggggccctggacactggccagctcctcacatccccagacctcaggtttctgctctgcagaatgggtttrgaaggacaggcgcacaggcctactgccactggaccctcccaccctgcccaggycccctcacctgcatgcccagcttgacctcgtggcacagcaggtgcaccagtggctggtagtagctggagggcagcaccgtctcgtcccgcagccgcacctccagctgcaaggagcccaggttgcccctggaatgggcagcctgtgacctctccaccagggactcaggccaccctggaccacaccactcccayggcctccagttttttccsttggggmcrgcttcccatctctctgctcatgccctccatycgggtgccctgcatagctctgcctcccaggctctgcccgggctatttattttctgtttttggaaagcccttcctgtctctgcactcaaggcacctctmtctgtcttcgaggtctggctccctgccacctccaagcttgggtatgtggagctgccagccttgaatcgatcaactcccagataatggcaccatcatgggtacactttacagcagaagcaaatccccaaccctcataacaacctaatagggaaactgagacccgagccagttcagcaacttgccacattagattgagcttcccagcttccctgttctgatagggaagttcagaacagaggagggtgtggaccaagtgggagcctctaaggctcccacatgcccgtgctcagcacgagcctcatgcacagagcagtgttaagatgggcccctgggcctggcgcagtggctcatgcctgtaatcccagaactttgggaggccaaggcaggcagatcacttgaggtcatgagttcaagaccagcctggctgacacggcaaaaccccatctctattaaaatatatatatawaaattagccaggcattgtggcaggtgcctgtaatcgcagctactcgggagactgaggcaggagaagcgcttcaacccaggaagcagaggttgcagtgagccaggattgcaccactgcactccagcctgactctgtctcaaaaaaaataaataaataaaaaataagatggcaagatgggccttggctggttctatggaaacaccttgtgctggacacacagccgtccacctgctcctaccctgttaaggatgggaactgggggartgggggtctggggccttccacagagacacaaagctgaaccaytgagggctgtgggccacagcaaacaagccagagggcttcctagacaggctgccagatttagcaaaacgacccaagacacccagttaaatgtgaatattttatttacttattttttttttttagagatggggtcttgctatgttgcccaggctggtcttgaactcstgggctcaagtgatcctcctgccttggcctcccaaagtgctgagattayaggcatgcgccaccatacccggcctaaatttgaatatttttagtataggtatgtctcaaatagtgcatggtcattcttcttctttatttatttattttttttgctgagatggagtcctgctctgtcacccaggctggagtgcagtggcacgatctcggctcactgcagcctccacctcccagattcaagcaattctccatcctcagcctcccaagtagctgagattagaggtgcccgccaccacatccgggtaatttttgtatttttagtagagcctcaccatgttggccaggctggtcttgaactcctgatctcatgatccacccgcctcggccacccaaagtgctgagattacaggcatgagccaccgcacccagctgttttcttgagacggagtttcgctcttgtcacagaggctggagtgcagtggtgggatctcggctcactgcaacctccatctcctgggttcaagcaattatcctgcttcagcctcccaagtagcttggattacaggtgcccaccaccattttttgtacttttagtagagacggtgtttcaccatgttggccaggctggtctcgaactcttgacctcaagtgatccacccgcctcaaactcccaaagtgttgggattacaggtgtgagtcaccacgcccagcggttattcttatactaaaannnnnnnnnnnnnnnnnnnnnnnnnnnnnnnnnnnnnnnnnnnnnnnnnnnnnnnnnnnnnnnnnnnnnnnnnnnnnnnnnnnnnnnnnnnnnnnnnnnnnnnnnnnnnnnnnnnnnnnnnnnnnnnnnnnnnnnnnnnnnnnnnnnnnnnnnnnnnnnnnnnnnnnnnnnnnnnnnnnnnnnnnnnnnnnnnnnnnnnnnnnnnnnnnnnnnnnnnnnnnnnnnnnnnnnnnnnnnnnnnnnnnnnnnnnnnnnnnnnnnnnnnnnnnnnnnnnnnnnnnnnnnnnnnnnnnnnnnnnnnnnnnnnnnnnnnnnnnnnnnnnnnnnnnnnnnnnnnnnnnnnnnnnnnnnnnnnnnnnnnnnnnnnnnnnnnnnnnnnnnnnnnnnnnnnnnnnnnnnnnnnnnnnnnnnnnnnnnnnnnnnnnnnnnnnnnnnnnnnnnnnnnnnnnnnnnnnnnnnnnnnnnnnnnnnnnnnnnnnnnnnnnnnnnnnnnnnnnnnnnnnnnnnnnnnnnnnnnnnnnnnnnnnnnnnnnnnnnnnnnnnnnnnnnnnnnnnnnnnnnnnnnnnnnnnnnnnnnnnnnnnnnnnnnnnnnnnnnnnnnnnnnnnnnnnnnnnnnnnnnnnnnnnnnnnnnnnnnnnnnnnnnnnnnnnnnnnnnnnnnnnnnnnnnnnnnnnnnnnnnnnnnnnnnnnnnnnnnnnnnnnnnnnnnnnnnnnnnnnnnnnnnnnnnnnnnnnnnnnnnnnnnnnnnnnnnnnnnnnnnnnnnnnnnnnnnnnnnnnnnnnnnnnnnnnnnnnnnnnnnnnnnnnnnnnnnnnnnnnnnnnnnnnnnnnnnnnnnnnnnnnnnnnnnnnnnnnnnnnnnnnnnnnnnnnnnnnnnnnnnnnnnnnnnnnnnnnnnnnnnnnnnnnnnnnnnnnnnnnnnnnnnnnnnnnnnnnnnnnnnnnnnnnnnnnnnnnnnnnnnnnnnnnnnnnnnnnnnnnnnnnnnnnnnnnnnnnnnnnnnnnnnnnnnnnnnnnnnnnnnnnnnnnnnnnnnnnnnnnnnnnnnnnnnnnnnnnnnnnnnnnnnnnnnnnnnnnnnnnnnnnnnnnnnnnnnnnnnnnnnnnnnnnnnnnnnnnnnnnnnnnnnnnnnnnnnnnnnnnnnnnnnnnnnnnnnnnnnnnnnnnnnnnnnnnnnnnnnnnnnnnnnnnnnnnnnnnnnnnnnnnnnnnnnnnnnnnnnnnnnnnnnnnnnnnnnnnnnnnnnnnnnnnnnnnnnnnnnnnnnnnnnnnnnnnnnnnnnnnnnnnnnnnnnnnnnnnnnnnnnnnnnnnnnnnnnnnnnnnnnnnnnnnnnnnnnnnnnnnnnnnnnnnnnnnnnnnnnnnnnnnnnnnnnnnnnnnnnnnnnnnnnnnnnnnnnnnnnnnnnnnnnnnnnnnnnnnnnnnnnnnnnnnnnnnnnnnnnnnnnnnnnnnnnnnnnnnnnnnnnnnnnnnnnnnnnnnnnnnnnnnnnnnnnnnnnnnnnnnnnnnnnnnnnnnnnnnnnnnnnnnnnnnnnnnnnnnnnnnnnnnnnnnnnnnnnnnnnnnnnnnnnnnnnnnnnnnnnnnnnnnnnnnnnnnnnnnnnnnnnnnnnnnnnnnnnnnnnnnnnnnnnnnnnnnnnnnnnnnnnnnnnnnnnnnnnnnnnnnnnnnnnnnnnnnnnnnnnnnnnnnnnnnnnnnnnnnnnnnnnnnnnnnnnnnnnnnnnnnnnnnnnnnnnnnnnnnnnnnnnnnnnnnnnnnnnnnnnnnnnnnnnnnnnnnnnnnnnnnnnnnnnnnnnnnnnnnnnnnnnnnnnnnnnnnnnnnnnnnnnnnnnnnnnnnnnnnnnnnnnnnnnnnnnnnnnnnnnnnnnnnnnnnnnnnnnnnnnnnnnnnnnnnnnnnnnnnnnnnnnnnnnnnnnnnnnnnnnnnnnnnnnnnnnnnnnnnnnnnnnnnnnnnnnnnnnnnnnnnnnnnnnnnnnnnnnnnnnnnnnnnnnnnnnnnnnnnnnnnnnnnnnnnnnnnnnnnnnnnnnnnnnnnnnnnnnnnnnnnnnnnnnnnnnnnnnnnnnnnnnnnnnnnnnnnnnnnnnnnnnnnnnnnnnnnnnnnnnnnnnnnnnnnnnnnnnnnnnnnnnnnnnnnnnnnnnnnnnnnnnnnnnnnnnnnnnnnnnnnnnnnnnnnnnnnnnnnnnnnnnnnnnnnnnnnnnnnnnnnnnnnnnnnnnnnnnnnnnnnnnnnnnnnnnnnnnnnnnnnnnnnnnnnnnnnnnnnnnnnnnnnnnnnnnnnnnnnnnnnnnnnnnnnnnnnnnnnnnnnnnnnnnnnnnnnnnnnnnnnnnnnnnnnnnnnnnnnnnnnnnnnnnnnnnnnnnnnnnnnnnnnnnnnnnnnnnnnnnnnnnnnnnnnnnnnnnnnnnnnnnnnnnnnnnnnnnnnnnnnnnnnnnnnnnnnnnnnnnnnnnnnnnnnnnnnnnnnnnnnnnnnnnnnnnnnnnnnnnnnnnnnnnnnnnnnnnnnnnnnnnnnnnnnnnnnnnnnnnnnnnnnnnnnnnnnnnnnnnnnnnnnnnnnnnnnnnnnnnnnnnnnnnnnnnnnnnnnnnnnnnnnnnnnnnnnnnnnnnnnnnnnnnnnnnnnnnnnnnnnnnnnnnnnnnnnnnnnnnnnnnnnnnnnnnnnnnnnnnnnnnnnnnnnnnnnnnnnnnnnnnnnnnnnnnnnnnnnnnnnnnnnnnnnnnnnnnnnnnnnnnnnnnnnnnnnnnnnnnnnnnnnnnnnnnnnnnnnnnnnnnnnnnnnnnnnnnnnnnnnnnnnnnnnnnnnnnnnnnnnnnnnnnnnnnnnnnnnnnnnnnnnnnnnnnnnnnnnnnnnnnnnnnnnnnnnnnnnnnnnnnnnnnnnnnnnnnnnnnnnnnnnnnnnnnnnnnnnnnnnnnnnnnnnnnnnnnnnnnnnnnnnnnnnnnnnnnnnnnnnnnnnnnnnnnnnnnnnnnnnnnnnnnnnnnnnnnnnnnnnnnnnnnnnnnnnnnnnnnnnnnnnnnnnnnnnnnnnnnnnnnnnnnnnnnnnnnnnnnnnnnnnnnnnnnnnnnnnnnnnnnnnnnnnnnnnnnnnnnnnnnnnnnnnnnnnnnnnnnnnnnnnnnnnnnnnnnnnnnnnnnnnnnnnnnnnnnnnnnnnnnnnnnnnnnnnnnnnnnnnnnnnnnnnnnnnnnnnnnnnnnnnnnnnnnnnnnnnnnnnnnnnnnnnnnnnnnnnnnnnnnnnnnnnnnnnnnnnnnnnnnnnnnnnnnnnnnnnnnnnnnnnnnnnnnnnnnnnnnnnnnnnnnnnnnnnnnnnnnnnnnnnnnnnnnnnnnnnnnnnnnnnnnnnnnnnnnnnnnnnnnnnnnnnnnnnnnnnnnnnnnnnnnnnnnnnnnnnnnnnnnnnnnnnnnnnnnnnnnnnnnnnnnnnnnnnnnnnnnnnnnnnnnnnnnnnnnnnnnnnnnnnnnnnnnnnnnnnnnnnnnnnnnnnnnnnnnnnnnnnnnnnnnnnnnnnnnnnnnnnnnnnnnnnnnnnnnnnnnnnnnnnnnnnnnnnnnnnnnnnnnnnnnnnnnnnnnnnnnnnnnnnnnnnnnnnnnnnnnnnnnnnnnnnnnnnnnnnnnnnnnnnnnnnnnnnnnnnnnnnnnnnnnnnnnnnnnnnnnnnnnnnnnnnnnnnnnnnnnnnnnnnnnnnnnnnnnnnnnnnnnnnnnnnnnnnnnnnnnnnnnnnnnnnnnnnnnnnnnnnnnnnnnnnnnnnnnnnnnnnnnnnnnnnnnnnnnnnnnnnnnnnnnnnnnnnnnnnnnnnnnnnnnnnnnnnnnnnnnnnnnnnnnnnnnnnnnnnnnnnnnnnnnnnnnnnnnnnnnnnnnnnnnnnnnnnnnnnnnnnnnnnnnnnnnnnnnnnnnnnnnnnnnnnnnnnnnnnnnnnnnnntggaggttgcagtgagctgagatcgggccactgcactccagcctggtatgatggagcgagattgtctcaaaaacaaaaaacaaaaaaaccccaaggttttactgaaatattgagaatctccccagaaaaaataaggaggaaatgttctttcttcctctgcagcaaatggaccttcttaggctgacttggaattgcagcaggagtctcattgccgaggacaacgggggacaagtcccctcactctgagagaggcctggacattcctctcccctgctaggactcactagaaggccaaccactgtggccccagaggatgggasaggggagattcctggagagaggggagggccagggagacatgcttccatgcctcccatctccgtgggtgacgatgggtgcctgggagaagtggccccgaggtcccagagcccggccacgtgtgtgagcgggtgcacacgtgtgcatgcctgtcccccagacagcctggtgccyrgaaaggataaggatggargaagcrggtgagttggggtggggcgggggggaatgaatggcagggccagagagtgagcgagtgtgggggcgtggctgaggctcggcccaagcccagacattttccatccatttctattttcccaggacagaaaataactcccgggaagccagagtgagcaacatgggcatcatccgacccacacccctctgcccaagggaagtcttcctcttaaacaggctgaccnnnnnnnnnnnnnnnnnnnnnnnnnnnnnnnnnnnnnnnnnnnnnnnnnnnnnnnnnnnnnnnnnnnnnnnnnnnnnnnnnnnnnnnnnnnnnnnnnnnnnnnnnnnnnnnnnnnnnnnnnnnnnnnnnnnnnnnnnnnnnnnnnnnnnnnnnnnnnnnnnnnnnnnnnnnnnnnnnnnnnnnnnnnnnnnnnnnnnnnnnnnnnnnnnnnnnnnnnnnnnnnnnnnnnnnnnnnnnnnnnnnnnnnnnnnnnnnnnnnnnnnnnnnnnnnnnnnnnnnnnnnnnnnnnnnnnnnnnnnnnnnnnnnnnnnnnnnnnnnnnnnnnnnnnnnnnnnnnnnnnnnnnnnnnnnnnnnnnnnnnnnnnnnnnnnnnnnnnnnnnnnnnnnnnnnnnnnnnnnnnnnnnnnnnnnnnnnnnnnnnnnnnnnnnnnnnnnnnnnnnnnnnnnnnnnnnnnnnnnnnnnnnnnnnnnnnnnnnnnnnnnnnnnnnnnnnnnnnnnnnnnnnnnnnnnnnnnnnnnnnnnnnnnnnnnnnnnnnnnnnnncatcttcaagtccagaaaacctccccaggaccctctcttttttctttcttttttttttttttttttgagatgcagtctcgcttgtcacccaggctggagtgcagtggcgccatctcggctcactgcaacctctgcctcctgggttcaagactcctgcctcagcctcctgagtagctgagattacaggcgcctgccaccatgcccggctaattgttgtatttttagtagagacagggtctcaccatggtggtcaggctggtcttgaactcctggcctcaggtgaaccacctgcctcggcctcctaaagtgctgggattacaggtgtgagacactgtgcctggcgagaccctctcttgagagcaggctttgatgggaggtggccagctctgggaccaggaggtagaggtggggcgagggggggctcagcttcctcattgggtttctctagttgcaggggacccactgcccgcccccaggcccctgagtctcacctggcctccagcacagagcagcgtagctggcaggcccgggcccctgggcgcacttccagccgcaggtggatctcgccctgcacctcctcatcagggtcaacctccgtcaggtgggcccacccgctgaaacctgtggggtcagctcagccagggacacggccctgaacccccataccctccaccctcagcccyaccaggcaccttgaggcacctccataatctcctgggaatcccctaggcacccgtgaagcaggggctggtatccccaatgacagatggggaaactgaggctcmgcaggtgaagaaacagcagttggaagagctgggattagaatctaagtcagtgacctggggcctgtgccctcactattgtgtcatttttgtcrttgttgtttttagagacagggtctcaccctgtgagccaggtgtggtggcgcatgcctgtaatcccagctcctcaggaggctgaggcaggagaattacttgaactcagatcgcaccattgcactccagactgggtgacagagcaagaccccatctcaaaaaaaaaaaaaaaaaaaaaaaaaaaaagatggagtcttgctatgttgctcaggctggtctcaaactcctgacctcaagcaatcctcccacctcagcctcccannnnnnnnnnnnnnnnnnnnctgtaatcccagcactttgggaggccgaggcaggtggttcacctgaggccaggagttcaagaccagcctgaccaccatggtgagaccctgtctctactaaaaatacaacaattagccgggcatggtggcaggcgcctgtaatctcagctactcaggaggctgaggcaggagtcttgaacccaggaggcagaggttgcagtgagccgagatggcgccactgcactccagcctgggtgacaagcgagactgtatctcaaaaaaaataaaaaagaaagaaaaaagagagggtctggggaggttttctggacttgaagatgyttcttgggtgatttccactcaaggggatatgtcccttaagggacagtctaatgttctcatggaggaactggagccatcacagaggagtggagtagggggtacgggtgaggagaccccgaactctgatcacacagcctcagtcccccagtgctaaggccggcttccywatgtttaacgccagtgtgaacttggcctggtgggagtgtgtgtaagtgggtccctcgtggggctgggggggtgaaaagagttgctgaaaatctcccgatgggcaaattgagggttcccccaaggagggacagtggtttggatggttccatgggcctgagtcacctgtgacagggccaccccccaacccccagggtatttttagctgcaggctgcactcccgtctgggcctgggtctgagtcacactctgtccgtgagaagcgtcttcccttccrgctccaaasccacctccccaagtygctccctgcctgtgaggcaggagggtggcccccagccaggcagccctatggagccagtgttccccccacccttgaggggtcagcctgtctaagaggaagacttcccttgggcagaggggtgtgggtcggatgatgcccatgttgctcactctggcttcccgggagttattttctgtcctgggaaaatagaaatggatggaaaatgtctgggcttgggccgagcctcagccacacccccacactcgctcactctctggccctgccattcattcccccccgccccaccccaactcacctgcttcttccatccttatcctttctgggcaccaggctgtctgggggacaggcatgcacacgtgtgcacccgctcacacacgtggccgggctctgggacctcggggccacttctcccaggcacccatcgtcacccacggagatgggaggcatggaagcatgtctccctggccctcccctctctccaggaatctcccctctcccatcctctggggccacagtggttggccttctagtgagtcctagcaggggagaggaatgtccaggcctctctcagagtgaggggacttgtcccccgttgtcctcggcaatgagactcctgctgcaattccaagtcagcctaagaaggtccatttgctgcagaggaagaaagaacatttcctccttattttttctggggagattctcaatatttcagtaaaaccttggggtttttttgttttttgtttttgagacaatctcgctccatcatccaggctggagtgcagtggcccgatctcagctcactgcaacctccaccttctgggttcaagcaattctcctgcctcagcctccctagtagctgggattacaggtgtgcaccaccacgcctggctaattttttgtakttttagtagagacgagacttcactatgttggctaggctggtctcaaactcctgacctcaggtgatctgcctgcctcggcctcccaaagtactgggattacaggcgtgagccactgcacccgggctgtttttttttttggtgttttttttttttttgaggcagtctggctctgtcgcccaggctggagtgcagtggcgttttcttggctcactgcaacctctgcctccccaggttcaagcaattctcctgcctcagcctccttcccaaagtgctgggattataggaatgagccgctgcacccagcctcaatgttggggttttattagacagtcttgagggggaagaaaggcaggtatgagaggcttaaaatatcaaagatgagtgggctttggtgttcttccacaaagagttctaagtaggggatactggcagggtgcagtggctcactccagtaatcccaatgctttgggaagcagaggtgggaggatctcttgaggcccagatttcgagaccagcctgggcaacagcaagatcctgtctctacaaaaaaatttaaaaattagccaggtgtggtggggcacacctatagtgccaactacttgggaggctgacgtgggaggattgcttgagcccaggaggtggaggctgcagtgggctatgattgcatcactgtactccagcctgagcaacagagcaagaccctgtttaaaaaaaaaaaagaaaagaataaaagggccaggcgcggtggctcacgcctgtaatcccagcactttgggaggccaaggcaggcggatcacctgaggtcaggagtttgagggcagcctggccaacctggtgaaaccctgtctctactaaaaatacgaaaattagctgggcgtagcggcaggcccctgaaatcccagctacttgggaggctgaggcaggagaatcacttgaacccagaaggcggaggttgcagtgagctgagatcgtgccactgcactccagcctgggcgacagagcaagactgtttcaaaaacaaaacaaaacaaacaaaacaaaaacatatgtgtgcaggtatcttttttgtataatgacttctcctctgggtagatatccagtagtgggattgctgaatcaaatggtagttctacttttagttagttaaggaatctctgctgttttccatagtggttgtactagttcacattcccaccagcagtgtagaggtattccctgttcaccacatcctcatagtcagtactgttttgctgtgtggccttggatacatcttttccccaccctgggcctcagttctccctatctcagaaatgggtgggagcttggacaggacattttaacctctgctgtggcagaacctccaaggcgaggaggctgtggggaacccaggggaggtgtctagggcagctctgccttttgcccagcctggggagtccagtggcatcagcctaaccccctcccaccctcctctgggcagatcgtgaagaagtcatgctacccacgctggaatgagacgtttgaatttgagctgcaggagggggccatggaggsgctgtgcgtggaggcctgggactgggaccttgtcagccgaaacgacttcctgggcaaagtgagcaccaccgccccgccccccctcctcccccggcaggctgcacctgctgtcccccagcacctggttccattgcagccatcccatcctcagggacctccctccggcttccccaaagagggacactcaggaagcctgggactacccccccacctccaccgtctgccagaaccagcaacttccccccaccaccactggcactcagggacccttggaagaggcccctccccactaagaacagtagttggcaaggaggagacctaagtctcccagctccaggaaaactgnnnnnnnnnnnnnnnnnnnnctggcatagggagttggagctatggctcagggacactgaccttggagacttgaaccctggtctgaggtctgcagggaaattttcaaaggaaaatgtctgagtacttgtttcagaaacttccagaggcagaaagcaggagacctgtacaacctgtgagctaagaagacagacctggccgggtttggtggcccatgcctgtaatcctagcactttggcaggctgaggcgggtggatcacttgaggtcaggtgttcgagaccaacttggccaacatggtgaaaccctgtctctactaaaaatacaaaaattagccgagcatggtggcacacagttgtaatcccaactaatcaggaggttgaggcaggaggatcactggaacccaggaggtggaggttgcagtgagccaagattgtgccgctgcactccagcctgggtgacagagcaagactccatctcaaaaaaaaaaaaaaaaaaaaaaaaaagacagaagacagagctgagctgaatgcagaactgtggggaaaaataaaggggaggggccgggcgcggtggctcatgcctgtaatcccagtacttggggaggccgaggcaggtggatcaccaggtcaggagatcgagaccatcctggctaacatggtgaaaccctgtctctactaaaaatgcaaaacattagccaggcgcagtggcgggtgcctgtagtcccagctacttgggaggctgaggcaggagaatggcgtgaacctgggaggcagagcctgcagtgagtcgagatcacgccattgcactccagcctggggacagagtgagactccatctcaaaataaataaataaataaataaataaataaataaataaataaataataataaataaaggggaggtggagcccagccgggatgagaaggatgctggctaggtgggcagggkctgaggggaccctggagctgtgtctcctgacctctcacccctgagcagcccccctgccctgcctgcctgtagccaattcccaaatgtcagcccccaccccaccccttgaggccggctgcccagctccatgcacttactcgtcatgctgccggctcttggactggtcgggctgcagccggaaccarccctcctcctgctgygccacccgcagtctctggacatcgatcaccacctggggacatagtggcagttttcctggagctgggagacttaggtctcctccttgccaactactgttcttagtggggaggggcctcttccaagggtccctgagtgccagtggtggtggggggaagttgctggttctggcagacggtggaggtgggggggtagtcccaggcttcctgagtgtccctctttggggaagccagaaggaggtccctgaggatgggatggctgcaatggagccaggtgctgggggacagcaggtgcagcctgccgggggaggagggggggcggggcggtggtgctcactttgcccaggaagtcgtttcggctgacaaggtcccar

SEQ ID NO: 93670 - DNA, 66338 bp, Homo sapiens
gtgcaggtaggggggttgacagggggctgggatccagtggaagttttctgtttgtcccagttttctcaaagaaataggaagaaaaggtattggctgagagtaaggataggggagagagtattggagatgcaagcagagaagggagcttacatagtcttctaggagattaggagagaaaacggattagagaagaacagtagaattagtgggtcttcagggacaattcaggagctgtgatgaggaccaagaaggacagctgcctgtccttgcccagcagcacaggcaaggaggggagagaacactgagcatttgcaaagactgcagtgggggccaggcgtgcggtgggggccaggcgtgcggtgggggcaggcatggtggttcacacctgtcatcccaacactttaggaagccgaggcaggagcttgaagccaggagtttgagaccagcctgagcaacacagcaagaccccatctctacaaaaaatttaaaaattagccaagcacaatggcatatgcttgtagtctgagctattcaggaggctaaggtgggaggatcgcttaagttcaggagttcgaggttacagtgatgtaggatttttcttctcaatcactttgcaagctgaggacttctggccagcaacaccccacccaggccctgcttggctaagctggtgtgccccagcttgcctgcgttatagcttgtacccatgtttggtggttcccaagctcttgtactgcacccagaaagaatgaagatatgctggacatggaagggtgagcagggtggagaagactcttattgagcgacgaaacagctttcagcagagaggggacacgggggtggtccccctacccaaaggtgggaaagtccctcatgtggctgggtccgggccttttatggactcaggatggggagtgcatgctgattggtttgtgagtatgcaaaaaaggttaaagtgaagacaccactcaaaggcgggcatgacaatgcagaaaacaaattaggaaaggttaggtatatgtcaaataggtgcagggtgggaacaatctgaggaaagtgtgccaaacaggaagacgaattctccatccgatctggggatttaacttgtagtttggtgttcaggctttaaactgtcttcggcttggaggtggggcttcaccagggacctgcccctatttgcccaggcatttggctgcctcctgctgctctcaatagtgagctaggatcatgccagtgcactccagcctgggcaacagagtgagaccccatctcaaaaaaaaagaaaaaaaagaaagcagtttcctcaggggagagccaggtttcgggtacagcaggaggggaagagaatggaaaagaggttgaggaaatggtgaattatgctgataataaaaccaagttccagaaagttccagatggcacagtagaagggtttttggagttggtgaagagtgagaagtgcctactctggctgacttaagcacagaatttgagggcaggatatcagtgagggcccttgggagcttggagaactaagcctggaaaacaagagcaaggtcattgccaaactcatagcacagaactggacttgtgaagacaccactgctgcagttgggcgctgagggcctcggggcctgcaccgtccctgccagccagggaccctggccgctgctgctgctgcccttgaaactgccgaccgacacccttctcctctggcctgtttccttcacctgctcccactgtaagggctgggttggtgcacctgagttgctgaatggagctcacaggccttcactctcacttccaggcaggctggggagtgggcacagggcatttccaaattctgcagtcaatgcggttcttccttctatcaacattcataaggccggtatgcgttatagggtttttattacaaactacagagcttcctctcggtcatataagcagaaaggttcttattataggacattaacacacagaatctcagggaggacaagagatgcagctttggaaactatatagccaagaacagcacagtgaccgcaggccaccccttggtgcaattttaacaaagccaccactctgccccagcgtgggcaccaagtacactcaggaccagaccagagaagctccatcacagcctccccagaaaaactagatgctgctgcttctgccttcgctgaaagaaagttcccgctcacacagctgtggctttgggctgcccatccccattcccaaatccctggcgagtatgcccaattggcagagcccgtgcacctggccagcattaaggaagcctgggcaacatgttgtttgtggattctactgtgagaaggtagaactcaaaacagtagtagttctcaaacagtgagaactatcaaaatagaagatgttgaaaggatgttgtgtatctctgaagcagaacttcatcactgccagatggaattttctcttcttctctactctactcttctcttctcttctcttctcttctcttctcttctcttttctcttctcttctcttctyttttcttttctttcttttgacagagtcttgctctgttgcccaggctgcgagtgcagtggcatgatcttggcttactgcaacctctgcctcccgggttcaagcaattctcctgcttcagcttcccaagtagctgggattacaggtgtgtgccaccacgcccagataagtttcgtatttttaatagagacggggtttccccatgttggccaggctggtctccaactcttaacctcaggtgatccacccacctcagcctcccaaagtgctgtgattacaggtgtgagccaccatgcccggctggaattttctgtatgtaagaaaaggttatagatgttaggaagctggaaaatgacaaataagaaaaacggcaagtagccaccaccactattcccaatctcattcttctcactgctccagaagccaccagccactaccatttgaattcattattccactaaaatggaagatccttgacggcccctatatttgtctgatttatttaacaattgatcccaagtgcctagaacagtgcctggcacatagaagatgcttgatacatatttgctgatggaatgaaagacgctcgttcatttgccgcattgaaaaaaagacaaaacttcaagtggtttgtaggtttagaaaactgccagaggtagctttactttgaactccatgagtatctacagtagagagaagcagcagtgtaaagtcctccctcccaacccctagtggttaaacagattttataaaatagggtttgacaatcaaggactagcaggaagttgcagaaggcacaggaatggcagaaaacccaaaataaaccttaatgaggtcagtgtacattcattatgaatttagtgattgaaatcaggtgtaatttataaattttcactactacattagccatcttttatgattcatgctatcacctaaaacatatttcataaatattaaaattagaagacataggggttaggatttacatttcaaaaagccacccagttcccatagccctgctgggtaagcccttatctctctgtaccttagtagcagaaaacacaggagaagcacgaccatgaaaaagggcaaagtgcagtgaaatgcaattgagacctttaatctttgcctaagcaattcagccagaaagctctgtaactcacaaggcattataaaaatattccacaccagagctatttacaagttaactgctcctgaataaataaaagtccatgtgatagcttcatggctttctcttaaccaaagaggaaagtaaaactcatatttctatgtttttaaatttttcttctcaaaagggggctttatgaaatctagttctgtaggtatgtcgttcctctacactttactgcttgtataaatatacttacgtattcataagcaatactgtgctagatgcagaattcagatgcaggcaacagaaatcactgtagttattttaaatagaaacagaagaaagggatttaagatgagagactgcaagcctacacaatctttgaacggaatggaggagtgagctccagactgagcctttaggaaggactcccagaaaacaccaccatagaactagaagctgctatctctgcctcaatcagcaggccaccgctagaaacacgaacatatggtttggctgggagccaaggatctggaagcaactccgtggtctcgggactgagccactgagtcaatggggatgccagtttgtaagatagggaacacactaggaggaacaggcgtgggaagtagaaatgcagagagagttctgttttagccatgataaatttgagatgcctgttagacactcaagagaagatgttcagtaagaagttggatattgacgttgagtaagatgttgagtaagaagttggcaagtctggagcccaaaggaaactctaagttggagatttaatttctttcttttttttttttggaggtagagtcttgctgtgtcacccaggctggatggagtgcagtggcacaatcatggctcactgcagcctccacttcctgggctaaagtgatcgtcccacctcagcctcctgaatagcagagactactggcatgcaccaccatgcctagctaatattttatttttattttttatagagagaatgtcttgctttgttgcccaggcttgtctcaaactcctggcctcaagcaattctcccacctcagccccaaagtgctgggattacaggtgtgtgccaccatgcccaatctggagatttaacaggtttcatactatataggtcaggctgcaattttctttctattttttaaaattcaattatacctttgagatcaactaacttcatgagaaactagcttgctgtactcccttctctgcctatctttcagtcttcaaatccagagtaatccagtttctaccataaagggcccacaaaaagtgttctgaaacatycggtgtcatccaagtccaaaattggacagcttttttttcagttcttcctgtaacatttggcagtgttggccactctctgcttctttggcaagaatctcagaaaacactaataactgctccaggcaggagcctggaagaggttaccaagctagagaaggaagcaacagcatagcttgctaagggcaaacagcccagaggaaacccacggctctggtcaatcctgttgttgattgctagatccagagactgttgtagacctcccagttacagtgaggtatctgacaacccctcacaaggttcttgaagctccgtggtggagggtatcttggataaatccacagagacacattcaagagtaaattctccactgttggagacctcactcactctgtttggtctccaccaaagacacggtttttaattcatggagctgcactacaacagctcaagaactcccagccaaagttttagtttttctaggaacataaacgagccaatagtgtggaaatcggtgattaaaaacaaacctcgcacattttaagacagaattattacaagtagcatgtacaaaaggaaaataatagcctacatttagttcttctaagcttcattccacaagagattgaaatcgaagtattctgggctggcacacgatagctggaacatcatattttattctagaaacacatttgccttggcaaagaagagcgtgcctagaggagtggtcaggatagtgagggatctgtgatccttcgttctgaatctagaaaagtcactggatatgccccctcccccgccccccaacacggtcttatgttctgaatgtagaagtcactggatgtgctgacacacacacacacacacacacacacacacacacacacacacacacagagtctgtggcctctttcccaggcattccaagtccagcaagttcgcagggagctgtcagtccgtccaggaaggcccgggcctgggtttgcctcttcaagcagctactgcaggggcgtggggagggggcataagagactttggactttcctttgagacagtagaaagcgttacatccagaggcgagattctagcctggggtccccgccttcccggcctcctcttcctctccctctgactccctttcctgtgcccctccccctgcctctttcccggccagagtccagccttaacccgggcagagggcggagtcccgttaagggggtgtggggaggaggcggggccagggcaggggcggggcagagccgggccaagctgggcgggtcatgcgccctggccttcgcgcatctcccaggttagctgcgtgtccgggtgctaggctgcagacccgccgccatgacgctgcgcgcggccgtcttcgaccttgacggggtgctggcgctgccagcggtgttcggmgtcctcggccgcacggaggaggccctggcgctgcccaggtaagggggcccagcgccgccgccgcagtgggtcggggcctcaggaggcagaccgcgctgggcttgcagcccagctttcagattgctcctgtgccggagccctgcgaatcatgcgaatcatgaaactgaagacctggccctgaagtcccagtgcatatgaggagatccgttgtctttctaaatgttcataattaaacgttgccaaggtctccaaaattgctttctgtgaacttttccaaaagggagaggagttactcatggagctttgtgcttctgctgcctcctgtctaatggggtggcgcttaaagatgcgagccgagattcaggagagaagaaagttctctccccaggtgtgggttgcatgcttacttgtgtaatagcaaactgcagcaaccgcccaaagccacatcactgggaaatggtagatggggtgtgcagagtgagagctcagggacttgggaaaacacctgttctactacatgaaaaaaccaccccaccagaatctgaagctatttatacaatatggtttcagctatggaaaaaaggtacatgcagaaaagtgcctgaaagaaataggccaaagtacatcaaatgagattaggaataatgtaatgattttctttctctctctcttttttttgtgttttttttttttgtagtttccaacttctaaatttataaacaatgtattattcccacattcagaaaggagagaagtatacttatttataaagtgaaaaagaaggccaggcatggaagccattgttcatatcctccttttacatatgaggaaactgaggcacagaaagaaaccagctgtccaaatcacatagctgttaaagagcagagccagaaatccaaccccagtagtccatgtccggagcctttgcttttaatatagtaaggaagatgagatggcaagtagcttgagggaaaggcatgtaatctctgtgctttgggaagctaaggtgggaggatcacttgaggctgagagttcaagaccagcctgggtgaaagagcaagaccctgtctctccaaaaataaaaataaaattagctagacattagtgcatgcatgtagccccagctacttgggaggctaaggcagaaggattgcctgagcccaggagttggaggctatagttgtgtccagagttggttcctgtcggtgggttcgtggtcttgctgacttcaagaatggagctgtggaccttcgcagtgagtgttacactcgtaaagatggcgcagacccaaagagtgagtgatagcaaggtttatcgtgaacagcgaaagcacaaagcttccacagcatggaaggggaccccagcaggttgccgctactggctggggtggccagcttttattcccttattgtcctctcccatgttccatttctgtcctatcagagtgcccttttttcaatcctccccgtgattggctacttttagaatgctgctgattgtgcgttttacagagcgctgattggtgcattttacaattctcttgtaagacaggaaagttccccaagtccccactcgacctaggaagtccagctggcctcacctctcaatcctccctcataacaggacaccccacctgctactgggaactgggtgatgaccactctagctacttcctgctggataggggcaaagaaggggccctgccgttgtagtgtcctccagaggggaactctctaggccagtcaaagggccagtgggtcagtctagcagtcctcggtagaagttgtgagttaagctcatttggggttccatttgtaagaccatctgtagcttgatggccttgatcctggaggaaacaaatttgaggaggaggttaaaaatacagggactgaaggtgagtaatagcaagatggctgtcacgggacctagaaaggggagaagccaagtcacccaactccagaggttggtataagaatttgaaaggtgttgtctggtttcagaagccttttcctgtaaatgccaggcagcatcctgtactatccctgactggttagtttaaaaacaacactcctcccctaagaaggtgcaaagtcctcctttctcagcagtgaggaggtctagaccttagcggttttggagagtcactgttgccaaatagtctatttgggattgtagagtaaggatagatttatytattgcaaactgtctgagaaatcctttgagagtgtatggtagtaggataatgaagtagttaaactggctattctggttcctgtagcagtgggcattcctagccctataagtaggggtattagttgtatggtcctgggctgacagacttgagctttgaggggcactgatagggtctgatttcctgtggcattgttagtgttgggacttaggagaaggtgcaggtgcctgtccagctggtgggaggcagatataggttgaagttccacataagaagaatatgccttggctgggtagaataaactggttgtgtatgttaaaaaggtgtgtgagtttgttttcattttcccacactcctagagtacttgccaaggtagctctggtgagcagctggaaagggtgttgggagcagactgagtggctccctgtgctctattttcccattggagaaaaaaccgttttgtatctactaggaaccatccaagagagtaattgaaagaggggataagaagacatacactagtggtgggggcgctgctgcagggggtccaggggtgaatggtcatgcagggagtatgtttgccattacaaaacccagactgtttgttaaacagggaggaggtgatgattttggggggccctgagaagcagacaagccatctgaatggaggtgtttgggtgactcaggagttactatgatcagttggggcttgaagttatagggtgtaattacactgatgggatagtaggtgccccaggrgcaggcctgataacaggttgtgttggatgcataaaagggcttggaaagttaagatggtattcggtattcgtggtcacaaggtcttgtatgggcttttcctgaggattgtggcctccaggcacagtgaaggtgatattgtatctctagtgccctggaaactccctgagttaccatggctttaaaagccagaccattgtcactttgtaagctttggggaagcccaaatctaggaattacttcatgaattaggactttaaccacttcttgagccttctctgtcttgcaggacaaggcttcatccaatttgcaaaggtatcaacacagaccaacaagtattgaaatccccttgacttaggcatatgggcgaagtctaactgccagtcttctcctagatagtgccctattctttgttcccccagaggggccttatgatggaccaagggattattcctttggcacacctcacaggctttgactacttgttggatggtctgaaggagatttggccctgtaaatagggatttggccatttgatgagtgttctcaatacccatatgaaaagtttggtggagggtcttaagtattttccactggctggcttcgggcatgagtacctttccctcttctgttgttaaccacctggaggggagaaaactatgcccccatgaaagtcctcattctgtttcggttggggaatactggggcttaatctcttggagagggttgttccataccaagggtccttccgtaggtatttctaatgggaggttccacctggcagcaattttggcctcagtgtctgcctaatggttttcttctgccttttctccttcaccttttgatggctttggcagtgtaagactgccacctctttgggtttttgcactgcgtgcaataactccatgatttccttgtggtatttaatgggggttcccctggaggttaggaaccccctttccatattgcagcattgggcatgtaggattagataagcatacttgttatctgtatrcacatttatttttttttctttcccagttctaaggctcaggtaagcaccactagttctgctaactgggtgcaggtccctggggaaagaggcttactttcaagtactgttacatcactaactatggtataacctgcccttcatatcccattctccacaaatgaacttccattggtatataggttaaggtcaggattagctaaggggacttctaagagatcatctcgggcagcataagtctgggctacaatttgttggcattcatgctcgattggttccccatcctctgagagaaaagtggcagggttcagggccacacacaagcgcctggtatctaagcaggcagttgtctgacagccataaatttcctttggcacctagtatgccatttacatcattagtagtccagacagtgagatcctttctttgtattattttgatagcctccgatactaagatggccactgctgcaactacccataaacagtaaggccagccttttgccactacatcagtttccttacttaggtatgccactggttgtggggttgtcccacgagtctgagtaaggactccaagagctattcctgctctctctgtgatgtataaagagaagtcttgtcctttgggaaggcttaaagctggagcttgtactagggcctgctttaaggttttggaggctgtttctgcctctggttcccattctactagattagtgtttgccctctgggtctccttgattagagcatagagtggcctggccatctcgctgtatctggggatccatagtcggcaaaagctggtgatcccaaggaacccccacaactgttttaatgtcttagggcaaggacaagccagtataggctgtattcattctttgcttagagccctggttcctctggctaagattaggcctagatatttgacttgtaggcagagctgggccttcagtttagatgccatgtacccttgattagctagaaagttcaagagagctagagtagcctgctggcatgaggcttttgaactggtaaccataagtaaatcatccacatactgaaggaccagagtgcctgtacttgagaagtggcctagatcttgggccagtgcctgaccaaacagatgaaggctatccctaaacccttgaggcaagaccatccacgaaagttgggacgtgtggtctgtgggatcctcaaaggcaaagagaaccttggagtcagagtgcaggagaatgcagaggaaggcatccttgaggtccagaacaatgaaccattctgcttcctctggtatttgagagagcagggtataggggttgggtatagctggatatagaggaattactgcctcactgatgagtctaaaatcttgtactagtctccactgaacgttcggtttttgtactcctggaattggggtgttgcagggactgctgcattttcttactaagccttgaacttttaaatgtctaaaaatatcatgtaatcctttatgagcttcaggccttaagggatattgcctttgataaggaaaagtggtggggtctttaacctgatttggactgggcaggcattttttgcccttccgaattgtcctttcaatgcccagacttcagggttgattccctcctcaagtaggggacaacaaatgggtaacttgttccccatatttatagagataatatctctagctttggctaatatgtccctccctaataagggtgtggaactttcaggcacaacaagaaaggtgtgtgaaaagagcaaagtctcccaattacaactgagaaggtgggaaaaatagctggttacaggctgtcccaggattccttggatggtaacagaccttgaggacagccatctggggtaggagattaacactgagaagtctgcaccagtgtccaggaggaagtcaatttcctggccctcaatggttaaacttacctggggctcagtcagggtgatgacatgagctgtcacttgccctgggcaccctcagtcctgttgttggatcatccggttgggggcttctggcccagagaacctttgtcctctggggcagtgtgccttccagtgattgccttggcatagtggacatgggtgagggggcagcttgtttcttgttggacaatcttttttaaagtgtccttgcaaagcacactgataacaagccctactgggtgattggcctgctctgttttctgtcttctctgaaccaccaaggtttgtttgtgtgagggacatgactaaggctgcggcctttctcttatctcacttttcctttttggcctgttcctcttggtccctattgtagaacaccaaggttgccaggtttaattatgcctccaaattttgttcagggcccagggatagcttttggagctttttcctgatatctgcggctgattgggtaataaacttatcttttagaatcaattgaccctcgagggagtcaggtgacaggggagtatattttcttaaggcctcctgtagccgctcaaggaaggcagtaggattttctaccttttcctgagttatggtggacatcattgaataattcatgggctttttcctaattctccttagtccttctggaagacaggtcaacggatgtttgcgactccagtccccatgatctgagtctaggtcccagtggagatccatactggggacggcttgttgaccggtagggatttgtccctttctttggctgtcattctgtcatttacttgactaagataccatttacttgactaagataccaaactctcaggctgcagctaaagccgcattcttttcattaaagggcagggtttgatctaacaatagcatgacatctctctaagtgaggtcgaaggtttgccctagaccctgtaggacatctatatacctatcagtatcatctgaaaacttccccaggtctaccttgatctgctttaaatcagagagggagaaggggatatatacccaggttgggccaaattcccctccccctacagcttgaaggggacataaccgatagcccgggggttttatggtcccttggagatttctttgcttgtttccttctgagtgggggagattagaggaggcttatcattaacaggaagaggagctggagctaggctaggatatggaggtaagctcatgtttccaataccaagaatgttcttgttgtatcaagttgcttttttttttaatgaccacctgcccttgttttatagattcagtggtatcttcttcctgtatagttatattctttccctagttcctcttcttttatcatctcccattctctaagaagaagaaataattttcccctgttttcccactcacctagtgtcttgtagttatttgtttataccttgcctcccttgttcttctgtgagcttcctatgaatagcatcatatttttccacttttgcatcacagcacatagcacaatgcctcacatacctaagatgctcaataggattgttaagttgaatattgcattgcttcttaatactgaggagcagatactgaaagggaccaggagtcttttggaggaggtggaaatgttctaaaattggaatgtggtgatgcttacacaactgtaaatttactgcaaatcattgaattgtcatactacatgaatttaatgctatgtaattgtcttagtccattttctgttgcttacaacaggatatctgaaactgggtaatttataaagaaaaggaatttatttcttgcagttatggaggctgagaattccaaggttgaggggttgcatctggtgagggcatttttgctggtagggactctctgcagagtctcaaggtagcacagggcatcatatggtgagggggctcagtgtgctagctcaggcctcacttccacttcttataaagccactagtcccaatcccatgataacccattaactcattaacccattagcctatggatgaattaatccatccatgaaggtggagccctcatgacccaatcacttcttaaaggcccacctctcaattttaatttaatgccacaatggggattaaatttcaacatgagcttcagaggagacaaacgttcaaaccatagcagtaattataccttaacaaagctgtttaaaaaaccaacaactgttggcaaaggtatgggaaaaccattgctgacattgaaaagttgagcaaggccacagatattaggtatatgtctccatatagttggtccagagctgaccactgttacctgcaagagggtgtctgataaaaggtatacttgactattatcagaaataaagctcccaggatggggatatttgttctgttactcagggctggtaattttaactggcttgccacttcaactggaattcatctgggattggcaagccagttaaaattactttccagacctgagtaatagaacaaatgcattcgtacacataaatacatttgttctgttactcagtgtatttatttactgaggctgctgtaacagcaaacagagactggatggcaacaatggaaatgttttctctcacagctctggaggctggaagtccaagatcaagatgtcagcagggttggttccttctgaggcctctctccttggcttgttaacagtgttctccctgtgtcctcacatggttgactctctgtgtgtgtctgtgtcctaatcgccttataagggcaccagtcctattgttggattagagcccacctgtatgatcttatttaactcaattacctcttaaagacccactctccaaatacagtcacatcctgaggtattggaagttagaacttcaatgtatgtatttgggatgggggtatacaacccagccttaacacagtgatatggtttgaatttgtgtccccacccaaatctcctgtccagttgtaatccctaatgttggaggagggggttggtgggaggtgattggatcatgggggtggatttcctccttgctgttctcgtgatgttgagtgagttctcatgagatctagttgtttataaaagtgtgtagcacttacctcttctctctcttcctcctgctccaaccatgtaacacgtgccttgcttccccttcaccctccgccatgattgtgagttccctgaggcctccccagctatgcttcctctacagcctgcagaaccatgagccaattaaatctcttttctttataaattacccgatctgaggtacgtctttatagcagtgtgagaacagactaatacaggaaactttttaaaggttagaagatgacattaagataaaatagaaactagagaggcagaatcgaaaccacaaaaaacatattccattctttttgaagaaggtgaactcatgaaaaagttctttgagaccatgcctggtgcacacgaggacagtaatggccgcgtgcccactctcggttctgaccgttatatagtaaagtaggaagcgcctctgggtgaagctgctattaggtggtttcccatgggcagcttctctgtggaacatactgtgatttactgtatggtctcatgtcctcagctggatggctccttgcgcgcaaagatcccaatttgaactgcgtttgcattttccagttcctggcagtatccctttctagtggctgcttctcaatgaatatgaacagtgtctgtttccatgtgctgccatgacaaaatccacagaatgttcctgatgttctttgtgttttccagaggacttctgaatgatgctttccagaaagggggaccagagggtgccactacccggcttatgaaaggagagatcacactttcccaggtgaggggacatcaccacacagagccctttggatgaacgttctctgcctgtgtgcccatctccccgaacttggggcccaccataatagaaaacacccaccttttctgtgaagacaaatgttgttttaatggtattaatgggagtattgcagtcaccttaaaacatacttgctaatatattgtggcaaatggtgaacgaaaactgtgatgaaactattgggaagaacattattgaattattgactttttatttaatccataaaaaaacctcagtaatattgttggaaggtaagaaagagggaaatgctatatattttcttcttcttcttcttcttcttcttcttcttcttcttcttcttcttcttcttcttcttctttcttctttcttctttcttctttttctgagacaggttctcactctattgcctaggctggagtgcagtggcatgatcatggctcactgcagcctttacctcctgggctcagatgatcctcccacctcagcctcccaagtagctgggattacaggcacacatcaccatgcccagctgttttttgtattattattattattgctagaaatggggtttcaccgtgttacccagactggtctagaactcctgggttcaaatgatacacccaccttggtgttccaaagtgctaggattacaggtatgagccaccatgcccagcctatattttcaatgaacatacagaatttagagtgaatttctagtaattgctatgaaaatcctgcgtttcattcagactcctttggtggcttctgatagtctgtgtgtaacttctaggaaactggcatggctagagggaagaagcctggaaaactaaattatatcatgctaaggctatttacacttgacttgtcttaaaaaaaaaagtcttatcttgggagtgaatgtcatcttttaacttttcatgtgtatatactatacagacagaaaagtacacatagcatacagcttgatgacttttcacacactaagtatactgctgtcaccagcacccagatcaagaaataaaacattctcagcgctgtaggcaacacataaccccgctctggataccatccctccaagagtattaccattctaacttctatcccaatagatcacttttacctgttttggactttatgtaaatggaattgtgcacatcagctcttttgcgtctggcatcttttgctcaacattgtatgagtgagactcatcgttgttgcatgctgccatagatcattttattctcattgctgcatgacattccatcacattcatataccccaatctatccattcttctattgatggggttctgggtagttttcagtttgggactattacaaatagtgctgctatgatgatgtgtatatataacaatccattctgctattagtgagtgtattagtttgctagggctgtgtcttacatagcaccttcagctgctacctacagcaaatatgccatagactgtgtgactgaaacaacagacatttatagctcacagttctggaggctgggaagtccaagatgaaggcactggcaggttcagtgtctggtgagggctctcttcttggtttgcagatggccaccttcttgctgtatcctcacatggtagaaagcagagagacaggggaaaaaaagcaagttcttggctgtcttctccctgtgtcctcacatggtcatccctgtgtgtgtctatgtcctcatctcctcttcttatttgggcaccagtcatattggattaagattcgtcataatgacttcattttaccttaagtacctctttaaaggcctgatttccaaatatagtcacatcatgagactctgggggctaggacttcaacacaggaattttggggaggacacagtttagcccataacagtggacatttgggtagttccagtttggggcttgctatggtccaagtgtttgtgccccccgcccaaaatccctatgttgaaatcctaacccccaaggtgatgttattaagaggtggggccttcaggaagtaattgggtcatgagggtggaaccctcaggagtgagatcagtgcacttataaaagagatcccagagagctatcgagccccttctaccatgtgaagacagcaagaaggtgccatctgtgaaatagaaggcaagccctaaccagacaccaaatctgctggagccttgatcttggacttcccagccttcagcactgtaagaaataaatttctgctgtttatgagccacccagcctctggtcttttgttatagcagctgagatgggctaagacagggctcttaggaatagcactgctatgactgtgggtgaatataatacaatctatccattctgctgttagtgggcatttgggtcgtttctggtttgggactcctaggaagagtatagctatgaacatttttggccmtgtctcttggagaacatatgttggcatttccagtgggtatgtgtccaggagtggaattgcttggtcacagggaatgtatatgtttagatttagtagaccctgccagagcttttctgagtggccatacaaattgtcccctcacttcactttgacagtggataccactcatggaagaaaactgcaggaagtgctccgagaccgctaaagtctgcctccccaagaatttctccataaaagaaatctttgacaaggcgatttcagccagaaagatcaaccgccccatgctccaggcagctctcatgctcaggaagaaaggtaaggatctgatactggccaatctcaggccgaaccacccagaaccctcgggagcattaggtcagaatccattgaagtgagctttgagatcacagatcttctgagccacgatggaaagcctctttaaacatggccccaaagcaagttttatccaatggcaaaagcagcactattagaaaagctggaaaaatggcaggattttacttaataaagcaattgatgcccatgactgccttgtgaacatcattctccccttcaatggcactttagtaatgacccaaatgacatgatcttttgtcacagtgattaagaaacaaggcctttttagcaactgtgattttcttagcctctgggtatcagagtgtccaagctatgagttggctgacatgggctcagattatgtcacatagtctaagacatgaggtcaagttcatccataggcgttgacttggtgtgaacacctgactcttgtcataggcatattgaaactattccaccctcttatcagtagacttacctggttgtggctgagccatcccatgtctgcaactcttccctcctattgcgtgggaagagtctcaccatcaactcttcagtgtcttctttccagcattgcctagttctcaccctcgctggttaggcagataaagccaggggataatcctatttctatgtacacttctctagttttgaaatagaaacctagtccctgattgccaaggcaggtattctggaatttagtcaagcagtgttttcagtagcatggactagaaagaatgctggaccttcaccatgtggctctgggcagctcgtaacttgtctgagcttgtttgctgatctgtgaatctgggagggtaggattggccctgtccacccctgaggtggtagagatcaaaatgagctgatgaatgtataagtgctgctccactgttgtcaaggaggaaggagggtagtttctccatctaggcttctgagggccttgaatgaacccagctcatgcttgtgtctgtgtcagaggtgttcatgggtcaagatgattcttttccaatttgtcagttgaaagttgggcataagagattaataaaagtgagcacaacctgcttggcccatcattggagtcccttgggggtatctggagcatttcagggcaaaggtctgtagctggtctatctactggtggctttttgctcaggattcactactgccatcctcaccaacacctggctggacgaccgtgctgagagagatggcctggcccagctgatgtgtgagctgaagatgcactttgacttcctgatagagtcgtgtcaggtgggaatggtcaaacctgaacctcagatctacaagtttctgctggacaccctgaaggccagccccagtgaggtacggagacacttccttatggcagagaaggatgttcagagatattgcaaccagggaaaaactgaggagtgagcaggtgggatgcatcttgggcctggcaggacagctctgagtccacttctcccagaccacgtcttctcctagaagactgttacccattctttgatctagaaagttctcccagaggtgggcatttggctccattgtatagctcttacagaactttggtcaaaacaggcatcagcaaaagctgttttagcccagctgcctcagtttacttacaaagaaatggagatcctgggagacttgcaaggccacaagactagtagtcaggttcatccccacaaagggtgagtgaggacaggctccggtattgccatgctytcccaccagacaccctgtgccctgagcctgtctccagagatcacctgtcctaaagctcttttctctttgtgtgtctctactttaatctacaaaaggtgattgaatggagattaaattcctttccctcacatttccaaccccccacctccccacaagctgaccagagcaaaccctgaactctagccttggagtcctcaccatgctgcatcctgggacctcccctttcacctcctggactttgcttcttctcttctcagtgcctggagtcagcctcagagcagggctcccaatctaagcctgcacaggaatatatcagtcttcctatcgatggcttccaggttggatgagctgcttagaattctagacttcccttgtccaagatggtaaatgcatgcacccatgctttctatgacttccaggatttttcttctctttttatttatttattgtttaactaattaatttattttttcttagagacagagcctcactctgtcacctaggctagagtgcagtgaagcgatcatagctcactgcagcctcaaactcctgagctcaagtgatcgtcctgcctcarcctcccaagtagctatgaccacaggttcataccaccatgcatggctaattttttacattctgttgtaacgggggtctcactatattgttcatgctaatcttgaactcctggtttcaaccaatccttccagtctcccaaagtgctgggattacaggtgtgagccatcaagcctagcactttctttattactacatataaatttttgattcattaagaatctatttgggggtaagatataaagtaaggatccattttattcccccaaacagttaaccagtcataccaaggccattaaacaatcttccttaccaattggacatgacacttttcttagaaactaaattcttatttgtatttggttctatttcatagacatgtctgtttcttttctagtgccaaatttctaccttttgtagcttcatcaattgtttgactctctgccctcactacagttcttttccagatacattttttggtctacttatgcctgttgattttcccagaagaattttaatgtcaccttgataagtgtgtatcctctcctaaccctcttgcaatttcagaagtggctgaagccagtaggtctgtgtggggtcatatgtgcctttgttttcatgcgtatgttgtgtaattaaatgctttccattttagcagtagatggttataaaagaaaaagagtttttaatcycctcatcataaaatagcccctgtttgcattctggtgagtttctttctgagattctcccatgctgttttgggctcaggtcgtttttttggatgacatcggggctaatctgaagccagcccgtgacttgggmatggtcaccatcctggtccaggacactgacacggccctgaaagaactggagaaagtgaccggaatccaggtaacttgacttctgagcgagccaagcttcctggactcatctgtggtttctggactcaggagaaaaccacgagcagagaagctgctgtccgtggagtccatgaatgactcctgggcaccgctggttgggagtccatcacccactgtgcagtcagcacgatgtccctaaggagcatcttgcctctttctctgcagtcagtgaacagggagacaagaatttatactagtgttagtgccagggccggggaactggcagcaagagtgggatgttcaaggycatcctgacctcacttttgagagtaagtatggagaacgtttaccctaaggatcagggcccctacctggcatgtcgagcatgccgctggcactcaggtgcagccctttagttccacccagctcagagggaagcctcttaagaaaagcctgtccgtccctgaggtggttgggacagccatcatgatgtccctggggttgcctggggattagcctgctcctccagttctgaggcacctttcttttttggggttgacctgagatcgctgatctcactgagtccacagccttctgcagaagtgcagcaccctcatcctgtgagcacaggggagaagaggcaggagaaagctggcactcagctgaggctgccacatgtccaaggatgcacagccattgcctcaaagggaagtaggttagtttgctcgggctgccataacaaagtactacaggctgtgtggcttcaacaacagacatgtattttctcactgttctggaggctggaagtccaagatcaaggtgccagcagggttggtttctccagaagcctctctccttggcttgaagacagccactttctccctatttcctcacttggtttttccctgtgtctttctgcttcctaacttcctccttttatgaggatacccgtcagattgcactaggtcccaccctaatgacgtcctttaaccttagttacctctgtaaaggcctaatctccgaatacagtcacattctaaagtattgggggctaaggctgggtgcagtggctcactcctgtaatcacagccctttgggaggccaaggtgggcggatcggttgatgtcaggagttcgagaccaacctggccaacatggctacaaccccgtctctactaaaaatataaaaacttagccaagcatagtggtgggcacctgtaatcccagctgctcgggaagctgaggcacgagaatagcttgaacccaggaggtggaggttgcaatgattcaagatcgtgctactgcatttcaacctggacaacaagagcgagactctgtctccaaaaacaaacaaacaaaaaagtattggcactaagactttaacgtgaattttgagagtgatacagtttagcccatgacaagactgatttttttgtctttagtgaataaattaaaatgtatacccagtgactccataaccttaaagcatcttgcccaagctttgttcatttgtccttctacaaacctgcaagtcccaggcaacagagaagaaagcacatcagacttgggctcagggaacccatgtgcttgtgcccctggctaggtctgtcccctcagcatacctgagccacagatacctgtcctgtgaaactgggaaagtaaaaactatatctcacttctctttgtctcaggggtaggaggaagaggaagatagaaggaaaaatgaacatcatcccccttgtatttttttcattgtggaaaaatgcatgtaacgtaaaatttgccatctttgtgtgtgtgtgtgcgcgcacgcacgtgtgtgtgtggacagttcagtgatgttaagaaaatgtacactgtcgtgcagtcatcaccaccactcacctccagaactttttcatctccctcacatgaaactctgsaccatcaaacaccaactttccattcaatggcatgccctggcccctggcaacccccatcctgctttttttttttttttttttttttttttgctagggctgkgtcttatatagcaccttcagctgctacctacagcagacgtgctgtaractgtgtgtcctggcccctggcaacccccatcctgcttttttctctatgaattggactcctctagggacctaatgtaagtggaatcacaatatttgtctttttgtaactggcttatttcacttagcataatgtctccaaggttcacccatgttgcagcgtgggtctgagtttccttcctttttgggatagaatactaactattccactgtatggatagatcacattgggtttatccactgagctatccaaggacgcctgagttgcttttgccttttggctattgggaatagtgctgctatgaatgtgagtgtgcatgtatctctttgagaccctgttttcaatgcttctgtgtgtatacctacgagtggaattactggatcatatggaaattctgtttttcttttcttttatttattattatttcttttttcagacagagtctcactctgttggccaggctggagtgcagtggcacaatattggctcactgcaacctctgcctcccaggatcaagcgatttctggctaatttttgtatttttagtagagacaggattcccccatgttgatcaggctggtctaagtgatccacctgcctcggcctcccaaagtgcgaggtttacaggcgtgagccaccgtgcctggccaaaattctatttttaaatgtttgaggaaatgctgtgctgtttttcacagcagttatacccttttatatccccacagaaaaatcaccccttcttaaacaggggagcctgcgtctgtttctcagaggaaggcagtgggcgtcagtcatgaacagcctttgtaaattgcacaaacatataagatgattattaaagtaggaaccccccacttttcccacccccaaaagcaagggcatcccctggtgtatgacctaggaaactgaggacacatggcaggagggaccctaaggggcaccggccctgctcacaggccttggctcccgcccgaccatgggctcatggccatcaggagacagcagcctgccctcccccatcacactgagtccctccctgcccctgtcttctccagatgccatggagatgggaggactcacctcctgtgtccccctctgcagagtcttccatagttataaaggaggtagatttcttagcttacgtccccattttagaggtcacaaaactgagtcactgaggagaatgaatttttcgttgggttacgcctttaggactaaaagtgaccaatccagcagtaggattcacagcgtgtccagcagcagagttcaggcataaggctatattcacatacgtgtcctcagtagtgggctccttgtcatttctgcctcagggaaactgattccagtaaggtacaaaagccaccataaggactccttgttcaggaatttcctatttactgagatgggttagtctaagccctcacggactcctgagaacaggcctggcacctgccggtggaaggctattaggggctagactgtgtcccccaaaattaatacagtgaagtcctaacctctaatacctcaggatgtgactgggtctgaagaaagggcgttcaaggaggtaatgaagttaaaatcaggtcacaaggctgagccctaatctcatctgactggtctctttagaagaaggagagattaagcacaggagccgtggctcactcctgtaatcccagcactttgggaggccaaggtgggaggatcacttgaggccaggagttcgaggccagcctgggcaacatagtaagatcctgtctttaaaaaaaaaaaatagctggccgtggtagtgcacacctatagtcccagctacttaggaggctgaggtgggaggatcccttgagccaaggaggtcaaggctgcagtgagctgtgatcacatcactgcatgtcagcctggatgacagagcagagacccccaaaaaagggagaagaggcagagattaggacacacacagagaggtacccagggcatgaggacacaagggaaagaccatgtgaagacactaggagaagatggccatctgcaagccagggagagaggcctcaggagaaaccagccccaccagcaccttgactttggacttccagcctccagaactgtgaggaaataaatatctgttcttgaaaccacataaactggtattttgtcatggcagccacagcaaactaatacaaaggcccagagagtttgattttggccgacttgaaggagagacctttcagcagagctgtgctggagtgactgctgtgtgagcttcgcatggtgtcccacatgagcctgggcgaccatcggaggagctgccacagaagcaaataatattaattaaagtccaaattctctcgcttagagcaagtgatttttgcttcttgcttatatggagttcagtggccagtggccaggggcttcgcctcatgcagtcattcagggactcaggatgatggaggatgcactgtcttctacctgtggtttttgaggtcacactggacacccagctggaagatggggagttgaggaatgtagagaatcatttgggggttttaatgtgccaggtaggaggctgcactcttccatctgcatccattggccagaactcagtcttggggctccactcaactggaaggcaggagggagaatggagtctggctgtgctggcaggagagggagatgggctggtcagccaccaggagggctcaggatggagtggaaaaggtgatttccaaggcctcccctggcaccagtattcaggagagcctctcacggaaggaggctgctgctgtctctctcactrtacctttcctgcttacagcttctcaataccccggcccctctgccgacctcttgcaatccaagtgacatgagccatgggtacgtgacagtaaaggtgagtcagttttgtctctcagtcggctaagtgctctcccaccaggtcacctaaaacgaccagcagagacacccaagaggctgagctgtgaggatcacctgaacctgagcctgggaagtggaggttgcagtgagctgtgatcacaccactgtgctccagcctgggcaacggagtgaaaccctgtctcaagaaaaaaaaaaaaaaaaaaggaccagcagtgacatttgttaaatatcgagggtggttgaacatccactatttataaggaaatgttatttcccacaaatctcattcctcagaaatcagtgaaagacagaccctgtctcggattctataaagcagtgtgactgatgtggccaaacccccatagaacagcaggctagggagcttgggcagcctgggaggctaaagcatgcacacagctggcctgtgttggaggagagcatgttttcattcaacaggcatttatcgaacacttcctctgtgtcaggcacaggccagatacaaggggtgcagtgacgatcaagacagacctgtcctcaaggagcccacattgagggcaaagagagggaaaggtcattaaaatgttctttttgttttaaagggttatcataaagccaaggccacacacagagggccctggctcgtggcctggctgagacatctaacttggcttgctgacacagagcaggggtttagtacgtcctcatggattcactttgggatctttcctcatttgtcattggcctcatttaaatatgaaaggatctaaagcagtgggtccactcatcagcaaaaaaggccagacagctactgtgcaggcagataaacccagctggaatcttggttttgccacttaactgacattgcagccttggacaagcatcttatcccggtgagcatcagtatccacaacttcataatgaaatgacaataatatctctccatgccatttctgtgagaattaaatgaaatgttgtatgcagaccatggggcatagtatccaacagccacgtactccataaacagcagctgacaaacaggagaactggaggctatggctgtgctgaccttggagaccttggggacccttgctgtcctggaggagaaccttcagagagaaattctgagatgaatggagggtcttccatggtcccagggattttacactcacaacctcggtggtttggttacagcaaggatgaggtgcctgctcagaatgggatctgtgctcagaatgggttctgccagggtggaggcagccaccacaaatgtaaagtgggcatccaggcacgagtgggtttgcatagtaagaaaaggcttttctgggacttaaagctactgctcagcgccactgacatcccttctataactctgggttctcctgaaggggtgagtgtttaatcagggccytctggtctcatctctctggtggtaaagaggagtgaggggcttttcgcccagggctgggggctggattgtaaccgtggacagggttattctcataattcccttagggtttgcatatccagccagtttcaagagattatttatttgaccttgaaggagtgtgatcagaatcactttaccccaccttgtctttcccccaccccatatttaagagctggcagtgaatttctggggagtcccagctgcgccaggctctcagggggctgttgtattgattgccactgaatcctaaactgggttgataatagatctttctgtgttctggctttatggacatttttcttaacacagaaaaaaaatgagatgggaaaggacatgcgtttgctgggctactcagctgagtcaatatgaagctgtgagcctcagtatccacagcttcatgatgagatgataaagctcaagagtgagctgtttagttgggatctgtgctagaacacaggcgaactaggatcgtttttgatcagacataagtgtgaaacatttctcagtgtaaggtagatcaaatttaatgtcaacttttgccaagtgctgaaggaaagactatggaacaaactctgataaacactgtagtctgtgagagggtctgccagatgcccacctaatgttttcttgagcaaaatagcttgttgggaattatgaataaaactttctgtggggccaggtgtggtggctcatgcctgtaatcccagcactttgggaggccaaggcaggaggatcacttaatgccaggagttcgagaccagcctgggcaacatagtgagaccccccatctctaaaattagctggggtggtggtatgcatctgtggtcccagctacttgggagactgaggtgggaggatcgctagagcccaggagtttgaggctgcagtgagctatgatcatgcccctgccctccagcctgggcaacaaagtgagaccatgtcccccacactgcccaaaaaagaaacttccagtgtggggcacagcttggagtcatctaacatacagccaagtggaattgttccacgtgaatttctataatgtgactctgattgttctcctgcatttcctttaggatcgtggagatatgtaattggggtaagaacagggcactttgattatttggttcatttggctggaccccaccataacagtcaaggctggttagtggctataacaaacaccctgtccctttcagtggcttcacaccaagtgtatttctcgcctacagcacagtgcagtgttgtgggctctgtccacacagccattcaagcaaccagactccttctctctgctgcctccaccttcctcgaggcccatgtcattcaggcagagataggcaaagggagggaggccacgcacaggaggttcctgtgacccccggatgtagcacctttcctctgcttgggagacactggccggagctcacttgtgcgtccacaccgactgtaggagggggaggtgctctgcgagatgctaccatgtgtctggaagaagatgggaacacagactttgtcaagccctcacagtctctgccacacccgtagcccccaaaaagactatgggtgtggcaaagcttgaacagatttcatatttaagaagtaaacagctcttaatgaaacacttatagtattgagacagccaggtgggagggggtccccagagaaactccaaacagcctgtgcactggggtggagcctcaggaagttcttgccctttgcagcagggaggagcctggcccctcctcctcctgtgtggaaactgggattccaacagcgaggcrggaagtgctgtggcagggaactctggccttgcagagagtccctgttccccgtttttttccttttcaccaagaaaaccctgctctttactcatgcttcaaactgcgagcctatattttcatgaccttgggaacaagaaccccgtcttcagctgaactaaggaaaagtcttgcaacagtattctgcacgtgaccatgaatattaagctctgcacagtatcagccccctgtttaatatactgaaaacacatcacaacagcatcagaaactgtgagagtatgggggccttgtagagaggaaggagaagtgtgttgttttgttttattttgttttccaacatcataatctttgcagaattcttaggttatggtgagagccacctgtttttattgagtaggttggccagggcctcttctcagccattttcatgtaacactggggtctttcactgagaaatctgggtcatgcacaatccagcaacsgactgaaacggccctggcattctgcagacgctgtggggcctgggtccactgggcctggtgcttggtcgctgccctctcctctttcccttccacagcccagggtccgtctgcattttgtggagctgggctccggccctgctgtgtgcctctgccatggatttcccgagagktggtattcttggaggtaccaggtgagaaagctggggaagatgcagccagtcagggtgaggttgggggagtctagatggtgtggtccgacgtggactgtcgtgaggaagctgaaacctgacagtggagcattgtctccaaagtgtgaccaggttggggcaggagggtgactycagacctcagggctatgttaggccacgaggcacttttgcagattagaaaagggcagacttctttaagacactccatgccccctgctgggaagtctctgtaatgagtatagaaagctgcaagagctttgccagggaagatgctgtcttagatgtggcatttctcccgtgccccaccaccgtccacagcagccctgtataaatgggcttatttcagctccatggcaaagttaccgggtagtgccctgtggctcttggtttgatccatttacaggaagaaggggatggagggaagcaaagagggagtatccgcctaggactgatgggaccatgctggagtgtgcctgtttgttttctagatccctgctctggcccaggcaggttaccrggtcctagctatggacatgaaaggctatggagagtcatctgctcctcccggtgggtgygctgtcttgcagctgtcttatgctggtcttgccttctacctgcctgagcgctccaygcctcggtgctttccctggtcccagatcagagtagccttccccttaagagagtctgacttcacctctttcctctcctacggtgccctgtgtctctgcactttgggcctcagatgcccctgccccccacactctgaatgaatacagcagcccctaaggctcatgctccaagggatctcccactgatcatgggggatggcggacatagaatgtaccatccatctccagaacattcttcatcttgcaaaactgaaaggctgtattcagtcctcagttcttcctctccccaacccctgacaacttccattctactttctgtctctatgaatctaactcctctaaagactgcatataagtggaatcatacagtatttgtgcttttgtgtctggcttctttcacttagcataatgtcctgaagtttcctccatgttatagacggcaccacaatttccttcctattttttttttttttttttgagacggagtctcactctgtcacccaggctagagtgcaatggtgtgatcttagctcactgcaacctctgcctcctgggttcaagtgattctcctgcctcagcctccctagtagctgggattacacgtgtgtgccaccacacctggctaatttttgtatttttagtagagacccactttgctggatacatttatctttcagttcttgtaacttttcatgaattatttctttgwtaattttttcttgtattttctctatttttgttgttctttttctttttgctttctggaattgctattgttaaaatattgttattgttaaaattgctattattttttaaatcatactacccattgatttgggtactcatatgacccaaagtaacctacagatgcaatgcaatccctgtcaaaatctcaatggcattttttacaaaaatagagacagcaattctacagttcttatggacccacaaaagactgcaaatagtcaaagcgaccttcagaaagaataacaaagctggaggcatttgaagcacacttcctgatttcaaactacattataagtctatagtatgatacaaacagtgtgatacaaacataaagacagacatactttcagtggaacagaatagaaagcccagcagttgatccacatgtatgtggtcaactgatctttgacaagggtatcaagaatacacagtggagaaaggacactctcttcaaacaaatggtggtggggaaacatgaaaaagaatgaaattggacctttatcttacaccacacacaaaaatcaactcaaaatggatgaaaggcttagatgtatgacctgaaactgtacagcttctagaagaaaacacagggggaaagcttgacattggtcttggcaatgatttcacagatggatatgacatcaaaagcacaggcaacaaaagcaaaagcaaacactcgagtctacctcagtctaaggatttagtaagtttttgtgggtttttgttgttgttgtttggtttttggttttctttgcaaaaaggtccttttgatgtgttgatatattttaagtaacgtgaattaaatatgtttcttttatttttaattgcagaaatagaagaatattgcatggaagtgttatgtaaggtaagaagaatcttgggtaacatcttccccatcctgcgatttttgttgctataaacccgaagctggggtatccattcaaattttagggaagcatcatttcacagcctctgggtataaattcctactgaaagttgaacagtatttccaaatgatagcccacatgtatgcagcatcgactgtgtgtcaggtcttcctccaagcaactgacagaagagaaaactgagtcatgggaagttaaaggtaattgcctgaggtcagtagccagtagagccaggttggaagcctgcagtactgcattcgattgcctcaccatctaaagcattgaaaaaagtcactttattctggtaaagacattgttggccagacctaggccagacctgtgcagactgtgaccagcatggaattcctgctctaagacaggtgtaagcaccatcctggagaggggcccctcacttcagtgctggcaggggaggccaaggccaaggggaggagagactgggtcccaaacctccacgcagctcaggagcaaaagcaaaagctgggggagcccaggggaggaaacagcccccaggttggctggggaactagtaatgctgctggtgacactacgattacaaaagcctccatctctgagtcacagccctgtgggggcttctccccctcatgtgtgccccacagcttcatgcgctggctttggcatctcagaagcaatcatgggtaaaagttccatttccaggcagggctgctcctccttcctcagttttccagtctttgcctcttgcactctgctgcttctgatcccaagtgtctcccccaaagtcctaccaaggtctcaccagtgaccccaggagcccctatcctgctgttgtcctctaacctggaccttgcttatttccatcaaaatccattcttgagacagggacattgggtcacttaggagaactggtctcttgaagaaagtccttttaccaaaaacaaacaagatggtgctcccatcctcctgttccacctttgaaaaatcatgagtacatccacagctaggtatttacccaagaaaatcgatgacataggtccacaaagatacccagatgcaaatgttcacagcagcattatccctaacagccaaaaatggagacaacccacatgtccatcagctgatgaatggataaataaaatgtgggccatccctgcagtgggacactgttcagctatacagaggaatgacgtgctggtgcaagcttcagtgggaatgatccctcaaaagacgatgcttagcaaaagaagccagtttctgtgtcaggacagtgggtggtgggggcaggaatgtgttgtccccagggtggaacgagcctctcactgctcccctgcagcagcacaagggcaagctctacagggcagctgtcttccgtccccctccagtaaagagcccaggcttgctgtcttacaatggtgatgggatagttagggatatgtattggcatacactgaataattcactgtgcgtgtttggagtcagcttggttcctgagaggatgctgggaagggaagggtgatgtcgtgaagactgatgaacgatggacggctgcactgctcagcctggctaccgtaacaaagcgccacagactaggcacttcaacaatagacgtttgttttctcacagttttggaggctggaagtctaagatcaaggtctcggcctccggtgccagcactgaagtgaggggctcctctccaggatggtgcttacacctgtcttagagcaggaactccatgctggtcacagtctgcacaggtctggcctaggtctggccaacaaaggcacagttgtttctctgaggcctttcctgggcttgtagatgccaccttcttcctgtgtcctcacgtgctcgtccctctgtgcgtgtctgtgtcctaatctcctcctcttttcttttcttttttttttttttaataagcaacagggtctccttatgttgccccggttggtcttcaacttctgggctcaagggatcctcctgcctcagcctcccaaagtgctaggattacaggtgcgggccattgtgcccagcctaatctctcctttttttttaattttattttttttatttttttgagatggagtcttgttctgttgcccaggctagagtgcagtggtgcgatctcagctcactgcaacctccgcctcctgagttcaagcgattctcctgcctcagcctcctgagtagctgggattacaggcgccggccaccgtgcccagctaatttttgttttgttttgttttgggttttttttttgagatggagtttcactttgttaccaggctggagtgcagtggcatgatctcggctcactgcaatctctgcctcccgggttcaagtgattctcctgcctcattctcccaagtagctgggactataggcgtgcaccaccacacccagctaatttttatatttttagtagagatggggtttcaccatgttggccaggatgatcttgatctcttgacctcatgttctgcccgcctcggcctcccaaagtgctgggattacagccttgagcgactgtgcccggcttaatctcctcctctgatcaggactcccagacccgttggattagggctcacccatatggcctcattttaccttaatcatctccttaaaggctgtatcttcaaaaacagtcccattctgaggccctgggggttaggacttcaacacagcagttttggggaggacgcagttcagcccatcataaaggctgaggcasgcgggtgtggttgctgattttgcctgtgtgtgtcttcttccttaggagatggtaaccttcctggataaactggtaagtcattattttgaactgatatctttggagaattcctttggggcctgggtaattaaagaaaaggcgtcagcctcgagcagaggtgcacgggcagggagggcccattttggggcagtttagggcagagtgggcatgggcagggaaaatcacaaaaacaatgacaaagagcaaggattgcgtggagaacaggatggagatgagcttgtttatttgtcttttaatgaaaggcaggttccagggaatgggaccagggaggacagccttgagtatccattagagaagtttggaaaataccccataggctaatatttctcagctctttaaactttcatcccttctgacactcctaaaacctcctgtttgcatttgacattgtcatgaatgtcaaactcaatgataccaaatgaaagcaaatcagcagtggtgagctgagaatgcgcttttgcagagtacacttcccactcccaagactgcatggtataacagcgtccccttcccccaagtgaggtcagaggggcagaatggacggaggggtcaggcccaggcagaacagcagcagtggaggacagagaaggatgatggagctgtgggacttaaggcctcttaattggatgtgggagtcagagaggatctaggaggctgacctctggttcaccagcagggcgctgtgcctgacacggcagggaagagaccctgagaatatcatggtccctaccctctgcagattctcagtttcctgggattaggtttggaacttttgtgtgtgatggggacagggaacagggcatggcccagagtggccacccagtcctgactctgtacagacttctgtctagaagcgtgtcccttattgttgagagagtgactctgcggttgctgccagtggggtcagtgtggagcgaggtgtggataggctctgccatctaggtttcgctctgtgatgtttgtgtgacaaaaccacctgacacatttctgagaacgtgtcccccttgttaagtgacacgtggctatagctcttccataaaggggagttgacgttgtcattttcaataccagcagcggaaagagagagattaaagatgctttgggacttttaatggttgtttaagggaggagagcttccaaaaaagtggggttgtggggggtagaagcataatcatttgataaaagatgcacatggaacatgaagaggtaagttttacttcttttaagatagaagggaggaaaaaggagaaaagaacgaaagaaaatttgatttgagagaaggtagagagggagaaggaacccatggcctgtggccttggtctcctaagcagatgtaaaaggctggctatttgtgttgagggtctgtggctggtggagggaggagaggcttgaagggtgggcatttggagagctgctgtgggtcgggggaggagaccctggtgtcgaggggctggctgatggccgaacctctcagcaccccgttccagaagcctccccacattcggctcccttctttttccttctctagggcctctctcaagcagtgttcattggccatgactggggtggcatgctggtgtggtacatggctctcttctaccccgagagagtgaggtaattgggcctcgggcaataaagatttggaggaggctggacttgaactcctgtgagaattgttcctcagatctttaagcccagaaaacttctcaaaaacaagtaggtagtctgggaaggtgatgtcttcactctttagtgtctggtgacacattataaagagggcctagccgggcgtggtggctcatgcctgtaatcccagcatttttgggaggccaaggtgggtggatcacctgaggtcaggagtttgagaccagccctggccaacatggtgaaacctcatctctactaaaaatacaaaaactagccgggcatggtggcgtgcacctatactcccagctactctggaggytgaggcaggagaatcrcttgaacccaggaggtggaggttgcagtgagccaagatcatgccattgccctccagcctgggtgacaagagtgaaactccgtttccaaaaaaaaaaaaaaaaaaaaaaaaagggcctaatgagctaatgtgttaggaagcggcacctgttccacttacaggcaatgggacaaataattcagggcccgagtggccagtgggaatacaggaggatcctgacttgagcttgaggggtgcaggggaggcaacaggtgtgtcttcagtcctggactgagaatcagaaagcgtggccttcggtctgccctgatcagctgtgtgacacatcacttcgcttcttaggctttggcattctcaaccacaaagtggtaatggtaactcctgcctgactccacaaccagaaaatgctgtgcaaatgtccagtgagcccagcatgtcatggtccccaccatttcattcataatcattcttagaccagcatttcatggcttgagtgggagctatcagatggcaggttttgggcccagagactctgtagtctctttggccatttgagctggtgagctgcagctaaacctgtctgacttcccatttcagcctctggtcttagcaagttaaagaaacatcatcctaagccaccatctgaatttccctaactaacccagttattttgtatttggctaagtttatgagattggaactaccaggaaactttgttctgcttcactcctggctcaaatgataggattatatcaaagaataaaaagaatcaaatgttcctaaaatattgttaaagttttcatgstattgttgtgttcatctctctagctttttaaattttttaaaaaaatttcttgtgggtacatagcatattctagcttcttcctctctctttctctgtcccctctctcattcaaagtggaaataagagcttgattcttaagaactgggttcaccaaaaagttaccctgcagactgcacaacgtactggttaaagtcaacaaaaggaaagatagcaacgagctgtgtttgcccctcaaattcacccccttttctattcctgtttttttttttttttgagacagagtctcactccattgtccaggctggagtgtagtggtgcaaccttggcttactgcaacctctaccttctgggttcaagtgattctcctgcctcagcctcctgagtagctgggaccacaggcatgcaccaacacgcccagctaaattttgtatttttagtagagatgaggctttaccacattggccaggctggtctagaactcctggcctcaagtgatccacccccatcagcctcccaaagtgctgagattacaggcatgagccactatgcttgtccgtcttttctattccttttgctagcatcctattccctcttcaggtgataagtcagtggtctactggctggattcccaggttctggcctctctgtctgcttccatatggtctctcagtgcttgattaatcttcctgacctctctctctgtgtccatgtggtctctcagggctggattaatcatcctgactgcaactcggatccaccctcccttcttctgagacgccctcatggttttcttggttcttasagcaccaaattcagactcaggtcccttcatgtctaggctccccactgcctttctgttgttatttcccaacatattccattccatgcttggcttctagccacgcagactgtgtgctccattgaatacagctgcaagctttgcccccttctagaatttgctcaggctaccttatgttgttcccctcccaggccttgttctcctycccagctctccccattctgaaaagccaagttcaaatgctcccttttccacagggtcctccatgatgcccagttcaggaattccttatctccttccaactcctatgctattttgtgctattctatggctcatatcatagtcatctcataaggtcactgtgtgtttttctatttttccttattaaattataatgagctccttgaggataaaaacgatattttattcattttacattttctctcctctagtatatgccatagaattatgctcaatccagaggagacacaatgagtgaataaagggagggaaaaaaaatgaatgtatattttaaaactagagagagattcgtgtctccatattctatccagggttgctacagtatgtgtactgtgtgtgtgtgtgtgtgtgtgtgtgtgtgtgtgtgtgtkcgcgcgcgcgcgcgcacctatgtgtctaaggcaagttggtgagaaatactgcagtttagtaggaaaaaaaccaatggactaggaatcgaaaatcctgagttctgatcccattctcccattcactgctagtgtatgaccttgtgcatagaatgttcccactctgagcttcagttttgaactgcaaagtcctttctggctcttgtaagactgtcttcttacaggggctatgtcttgctgcctcttatttctgtagggcggtggccagtttgaatactcccttcataccagcaaatcccaacatgtcccctttggagagtatcaaagccaacccagtatttgattaccagctctacttccaagaaccagtaagtatggcaccaagggcaacaatgggagcattagtgtttgcctttccccttcctgtctccttcttatttgctttatcactgtcccctttaattttatgtggcattagtcagaaatgattttacaaatgggctcaggtgaaactggctgccatgcccagctgatccttcccaggcaatggcacatttccgtgtgtgttcgggtggtgaagggccgggggatgttgtaccctggggggatggcttctctggtgtctctgcaattgcagagttttggggctcaatgctcaggtagagctgcccctcctcattctctggctgaaaggctggtgattatggcaccagggtctaagagtcctgcaacaggccccacatgtgctctgaagaatctgagaagtttctaggtatcagtacacgtgccacaaagatgcctttcaaagatgcccccagatgtggctgatacatatattggggcatccctgccactgttaactggaattcactgagagcagcatcaggagtcaacgtcacctggcctggtgccccgcctacagctgccctcttctgtgggagacatctgctatgcatccacttgcaggaattatccagagagaataaaagatgtttcctgcacactccagagagagaggaatggaaggaattaattaatcaggaatgtgagagcgtctcccacgttcctctcccagcctccacctctgctcctcttaggagggaccgtttccagcaagaccacaaccatcccagtttcgattcaacgagtaactgttctccaacaattattttcattgatgagacagcatctgtgtgaaaggagctttgcgattcaggcaataactggactcattcaccaaaagctcccagcggcattttgaagagacctcgacatgtcgcatcccacatactacagggaggcctgggccctgctgtgccacagcctggtgtgtgggaatccacgagcttcctttggcctgaatgaaagcacaatgtccttcattagtgtgagatagtctcgatggtgagactatgggtgtggtgtgtggtgtagagggcgtattactttgctggggctgccataacaaaggctaggtagctcaacagactgggcagcttcaacaacagaaattcacagtcttatagttttagaagctggaagttcaagatcagggtatttgtagagttggtttctcttgaggcctctctccttggcttgtgggtagtcctcttctccttgtttcctcatatggtatttagcccattaaaaaaaattttttttgagacaggatctcactctgtcactcaggctggagtgcagtggtgtgatcatagctcactgcagccccgacctctccaggcccagatgatcctcccatatcagcctcctgagtagctgagactacgggtgtgtgcccccacacctggctcactttttgtgtgtgtattttttatttttattttattttatttgaggcggagtcgccctctgttgcccaggctggagtacagtggcgcaatctcggctcactgcaacctccgcctcctaaggttcaagcaattctcctgcctcagcctcctgagtagctgggtctaaggtgcatgccaccactcccggctagttttttgatttttttgtttgtttgtatttttagtagagacggggtttcaccatattggccagactggtctcgaactcctgacctcatgatctgcccgcctcggcctcccaaagtgctgggattacaggtgtgaatatatagagacggggtttcaccatgttaaccaggctggtttcaaactcctgggctcaggtgatccacatgcctcggcctcccaaagtgctgggattataggtgtgagctactgcacatggcctaaaatatttttaattgtggtaaaacacatgtaatgtaaaattgaccatgtcacctatttgtaagtgtgcagttctgtggcattaaccacatgtacattgttgtgcagccatcaccacatccacctccagaactttttcatcttcccaactgaagcccttcgcccattaaacactaactcctcatctcccctcctcccagccctggcagccaccattctactttctgtctgtatgattttgactcctctaggaacctcatataagtggaagcatgcagtatttgtccttgtgtgactagtttcttccacttagcatcatgctttcaaggttcacccatgttgtagcaggggccagaactgccttcctttttaaggctgaatagtattccatggtgtgtatagaccacattctcttaatctggtcatctgtcaatgggttacagctacagctgtttttgagctcttatgtgccacgtggttctaatcttcacagcaacacgaagaattctctcctatcttctcagctgagcaaaccgaggctcagagggcttaaccccaactggcccaagaccaggtacatgattgggtcaggayatcgacctaggcctgtttgactccaaagcccatgcctccaactaagccatgctggaggggagcttgggctttgttctgtgcgctatggggagtcaagcagagagaggagggacaaatcaggataggctcaaaatcctgattgcaaaagtgaccttaggagaaagacgcttagtaattacagcccttgtcaaggcacagttttttgtttcaaaggttgttaacagttattgtggaaaaatcagtacctctattctgttgtagcagctgggtttaaaatctgcagtgagagttttggggacagttttgttcttaagaacaaagcgccttggcagggaaatgttagatattcaaattagtgatctggccactgaaagatacccagtaaccaggttgggctgcatccagccactggaaccactcaataggtacagagctgggactggaggagaaatcactcacaggggttcctgccagcctgcctgatacctactctctaaggaacaagtaggcaaaggcacttcccatccctggccctcagtttcctcatctgcaaaaggttggttttgggtggttttcaaacaggtaatagcttcaaacttaagctgattccaggtcagcaaataaagccaataacatggagaacagctcttggatgtatagtgggtgctgggagttcctccttcctgccacctcctaacccgctccctccctggccaggaggaggcatttctgacatctcctccttctccctaggagcactgaggctgttccagacccatgcagcctaaggaagactccttctgtgctgtgggtgcacccgtctcccccacttatttttttattattattattatttgagacagagtctcactgtgtcgcccaggctggagtgcagtggcacaatctcggctcactacaacctccagctcccaggttcaagcgattctcctgcctcagcctcccgagtagctgggattacaggcacccaccaccatgcctggctaatttttgcatttttaatagagacagggtttcaccatgttggccaggctggtcttgaactcctgacctcaggtgatccatcctcctcggcttcccaaaatgctgggtgagccactgcgcccagccccatctctcccacttctgggtcatctctgctgagcactgcagggtgaggcttagactaactccaagtttagagtcagctcccatatagctctttgaacccttagccaacgtgctgaatcttggcctgggaatctgccaagtctgctggaaacaaacaaggcttgcttttcttgccttctcagagaagaggtgacagctttccatgtgtatagtgagaaagcatgaagactaggcagctctggcagcgaaggccagtggaatcggctgggtcatttcagcttagctgttccatgttttaattctgaggattcccaaagtcctcacttggcctgggggatactcacaccccattatgccccccataccagaacgtacctaggatatcctgtgaaccctgctctctcccacctcacgacactggtcctctttacttgtccttaaaccgcacatgtgtatttttatttctttgaggaagactgggtggcaggcacctgtgtgtgtgtctggaaacatatagcaagctagaggcagatttcaggcaaaaaaaaatgctcttttgggctgggcgtggtgactcacatctataatctcagcagacaggtggatcacctgaggtcaggagtttgacaccagcctggccaacatggtgaaacctcgtctctactaaaaatacaaaagagctgggtgtggtggtgcatgcctgtaatcccagctgctcgggaggctgaggcaggagaatctcttgaacctgggagatggaggttgcagtgagctgacatcgcagtactgcactccagcctgagcaaaaaaaaaaaaaagaaaaagaaaaaagagcccttttatttaagtatttaaccagaagagaaactaaggatcagagagaaaatgtgggaaaagaaaaattgtaggcagaaggttttacctggctgaaaatcatccacaaatgattttctttctcctcaaaacattgagtctctctctctttttttttttttctgctgtgttgcccaggctggtctctaagtcctggcgtcaagtgatcctcccacctcagcctcccaaactgctgggattacaggtgtgagagctgccatgccagcctaaatgttgaatctttcttaatctctagaacacagtagctccttcaggccatggggacagctggtgattagttacagagtttattttttaggttttgtttttgttttgaaattatgaagtaattcatccttgctatttaaamaagtcctgtgttgtgtaaagtaaaaagctgaatcgccctttgcccatcaacgagctactaatagctactactaatagtctggtatttcccagacattttttgaaatatttaaaaactatttttgaatgtttttaagcaaatatatgtgtgtatgagcacacacacatatataatttttcatataaatggaatcatgctgctttttcatttaatacatattgcacagatttttttgtcagcacatatagatttatctcattctttttaatggctgcatggggttttgtaacaggtagactatggattatgtaatcctctgtggagggacattattttgattatttttcacagccgaataatatagtttaaaagaaagtgccactgtttgctaccttatgcaccaagctttaactattgttactttaatttttttcttttttttttttttttttgagatggagtttcgctcttgttccccaggctggagtgcaatggcatgatctcagctcaccacaacctccatctcccgggttcaagtgattctcctgcctcagcctcccaagtagctgggattacaggcatgcaccaccacgcacggctaattttgcatttttagtagagatggggtttctccatgttggtcaggctggtctcgaactcccaccctcaggtgacttacctgcctcggcctcccaaagcgctgggattacaggcatgagccaccacgcccggctgttactttaatttttatgccctttatggaggaaacccttggcagggttattttcattgtcttaaattggcagtgttgtgttaggttgtggtgaaaagaaccaaatatggaggggtttggagtctgatgttctcatttataatctgcctgaccttcaacgaggcacttaaggcccctgacctgagcgtcttcctctgtgaaatgggcctcacagctcagggctgttatggacagaaagagctggcaccatcagcatgtggcaggcggcccccagtgccctgggtccctgtagagccttctaagtctttgctgtccacctctttctcatctgaccagccacactgcagagtcaaaggtcaacagtttgctgtctgcccagatttcggatgcttccagccactgccatttttgacctcagggacaaccaccccactgtttctcttggcctgtcttggagaacactggcgcagacttccagaggaattggagtcatttttgtcaaggtagacggagcatgaaacagagtcactggcccagcccgctgaccagcagaggcttcacctccactcctggatggcatcctttggcgttacttgtaaagggcaggagggctgagtgggggcttcgtggacctgcaatttggcttcaacagctgcctccattgtctcacccacaaaacaatagccacagttaagtgcagcctctcagcagacctgttctctaccttggaaaggacacaagagaagattaaagaggagaaactcctgggatggtggaggggagctctccctgttaggagggctgagcacaggaggcaatcctgtgccctccaccaatgtgggggcacctccctggcaaattaggtgactgacagtgccgcccctaccagcgctgagtggaaagtctagacaaaactccatctttttgtggtgccctgcatttctgggggctcctctgacagtgtgctgaatacgcacatgggaagtaaattgagaggatgagggaagtccagggcaccttggatcctgggaccctccagacccccaccctgcggttggcacacctgctgcctgttgctcctgggggtggtgcctgggccccctgagcccagggtaatgaagaccctggcccctttccctcctcaccctctcccctcagcccccacatcaagataccccctggagacatgctttagtgtaagctgggggccagaaatgggaggaaaataacagaagataacatttgtcctctgcttatgtgcttagctgagaccttctgactctttttaatctacaaaaggtaagaccgtatctttaaatcctacagaccaatgacaaatttcctgcctgctctggataggggcttctccttttgtgttcccactcccggggctgccataacaaagtaccacaagctgtgagttagaaccacaaaagtgaattctcaacagttcttgaggctagatgttcaaaatcagggtctcggcagggttggtcccttctgggggctcccgagagagagtccatttcatgcctgtctcccagcccctggccgttgctggcaattcctggtgttcctcagcttgtagacacatcacgcccgtccctgcctccrtcttcatgtggcatcctcccttctgtgtctctgtatgtctcaatttccctcttkctctcataaggacacaggtcattagatctagggcccaatctaaagccaagatgatatcatttaaagaaccctaattagatattaatttaaaattttaaaaaatcagccaggtgcagtggctcacacctataattccagcactttgggaggccaagtgggaggatcacttggccaggactttgagaccagcctgggcaacatagccagaccccgtctctacaaaaatgttttaaaagttagccaggcatggtggtgcacacatgtaatcccagctcctcagaagactgaagcgagagcatcacttgagtccaggagtttgaggatgtagtaagccatgattgcactactgcactccagcctgggcaacagagcaagaccctgtctctaaacgaataataataataatggagataatgatattaatatttattggcatgcctcctgcatgtcaggcattgtaagaaatgggcattatctcatttaatccttacaaaatccccattttacagatgaggaaaccgaggctctagggaaagaagttccccagctggtaactgtcagtacttgggcttgaaactgtgtttattggattctaaagtccatcctttaacttctgtgcgcaggaacacagaaggaggagcccctctccagggcagacaggaaatttgtcattggtctgtaggatttaaagatatagtcttatcttttgtagatgaaagagagtcggaagatctcagctaagtgcataagcagaggacaaatgttatcttctctcctttctggctcccagcttcatcctattctttctgttgctctgctgcacttttatgtgagtgaacagatttatttaccttttttctctctgattttttttaagagacagggtctcactctgttgcccaggttgaagtgcagtggcacaatcataactcactgcattcttgacttcctgggctcaatcagtcctcctgcctcattctccctagtagctgggaccacaggcatgcaccaccatgcccagctgatttttaaaatattttttgtagagtcagggtctctactgttgttcaggctggtcttgaactcctggcctcaaagtcctcctgcctggacctcccgaagtgctgggattacaggcttgtgccaccacacctagactctttgattttctttactgactttttgacatcgtttgccctttaaaggatcatttgaggcaaagccctgtccaggcttccatgggttccttcaaacactgaaatgcacccctgagctcatgaacagcagctgtttctgggatgaggactgctctcagtaaataagaatgatgaccgacagccacacacacagacctgaccagggcttccatccatsacctaaatgtgcttcttcccatggctatttctcactgtggcattcatcatcatgttgcggaaggccgccattggcaccattataattgaatcttacaaaacggagggaactgtcattaacaggcagacatagctttcatcagaaaatctccaaccctagatccagcacygccagatgatcaatgtctccattcttctgtgctgccactgcacagatccagagctctcgtgaggagtgatgagcagaacaaaaaagagtaacgtctcactgggcatggtggctcatgcctgtaatcccagcacttygggaggccgaggcaggcggatcacttcaggtcagaagctcgagactagcccgaccaacatgatgaaaccccgtctctactaaaaataccaaaaattagccgggcgtgatagtgggcccctgtaatcccagctacttgggaggctgaggcaagagaatctcttgaacccatcttggcagtgagctgagattgcgctactgcacaccagcctgggcaacagagcaagactccatctaaaaaaaataaaaataaaaaaagtaacctctcaacgtgtgcaagcactgaggactgcaggtcgctggaacgaaagctttgtggatgtggctttaggawcttcctgtcctctgactctatctcaaaggcagccacagatgctgctgagaacaggatgagtccccaccactaaggggatcccaggagagcacattcaaggctctgcaggatccaagaaaagcagagttaccccttggtggtgggaaagatggaacctcatggagaaggcagtgtttgggtccggtgttgaaggccaaactaatagaagtccatgctcttggtgaaggtcacaatgtgttaaaccagggaggccagcgagtaggaggcccgctcagaaaacacatgcagaacagttcagctgatgtttgggtgcgtgcaggtgggtggttagagggaaggagaggagagtcagttggcattgccacacttaactcaattccctctggtagcactagtccctcagcagcagctgtgttacagaaatattttattttattttattttatttattttgagacagagtttcgctctttttgcccaggctggagtgcaattgtgagatcttggcttactgtgacctctgcctcccgggtccaagtgattctcctgcctcagcctctgagtagctgggattataggcatgcaccaccatgcccggctaattttgtatttttggtagagacggggttttaccatattggccaggccggtctcaaactcctgacctcaggtgatctgcctgcctcggcctcccaaagctctgggattacagcgtgaaccactgcacccggccaagatttttattatttctgagtggttgcccctagtggatctctgcctccaggacagctgttttctcctaaactacgtctggaacagctttcgggtccaccatctttcaacttctggaaacgacagcttgaattaaaattgtcctcttatgctccaaaaagccatgaaccaggctacccccactaggagagtaggatccatggatggatctcttgtcaccttccagccatkcccctgttcttggtgtctgctttgctgaagtgctcctggagagggttggggtaggaaggagaggggaagcaggagaggaagactccacaccctgagcctccagtaggaatctcctccccagccctcagcacatgacattcagtgacctggacacttcactttagtcctcatccaagcccctcccccatcctttggtccaccaggaaggttctggagcctattttgtacattggcatctcttggtccagtttgccagagaaggagctcagtgtctgtggagctgatgaagcaagttcaggtcagagaattcccaccatacacaagccagagacctgggaacagccagagaactgtgtgtcgactgggtaattaaatgccatactgctcccaagaactggaaggacctggtcatttgtcaccaggaaggctatgtgtcccagctctttaacagtggaaaccttgctgccctgtctgtggaatacaatctattggcaatctaatggtctgtaacaattaagacccaagtcaaaggagttgattttgaagtttctacagcaaaaaaaaaattgtttaagtttctttgtaaagatggggtctcgctaggttgcccaggctgctcttaaactcctggcctcaatatagcgaaatttagatgcctggatggaagagcatttggtatatagtttttggcttttctgcttggtttctcagaatccttggagcccctctcttcttaccaccagtcagcctccaacccattcctctaccagccccctcccaagtcctttcaagagattattataagtagtaccttctcattataggaatattgaaaaacacaaagaaagtggcatctataaacctgcctcccgtggggaactacagttagcatcttgtattttatgctaacctttttaaaagacatgttttatgatgaaaattcaaatggatgctattctgatgaaacttgggctggatggggcacaggtagggtgcttgttgctttcagtcagatgaaggaggggtacagtttccaygatttctagggggtccttcattttgctttcttgattgttttagggagtggctgaggctgaactggaacagaacctgagtcggactttcaaaagcctcttcagagcaagygatgaggtgaggggtggggaygggtgcagaagaacaggagggggcagttgtgaaggaagtagggtacctagtgtgtggcagggaccaggagtagcaatctggcctccttttctttcatttctatagtcagggtaattgaggtcctcactctactgggaaaatttacatcctcrttgacacacaaggtcagagaatgattataataatgatggcttggaaattatgctattaccattaccattttaacatgcataattggcttacccaagtacaaaattaattgatgtccccaaccctcttcttgaagcagaggagtttagaaacctttaactctgtaagctgcaccctcctgtcttaggtgttaggagtcatcatcactattgttgttttatatacagtcagtgcctgctcaaactgtcccatattttctactttctttactgatcacttcttgcatctcactcatttgcattgagttcagtttctttcttcctgaaacatcccctttagtagttctctcaataagagtctgttggtggtaaattcacattttggtgcctgaagacatcttaattttaatcttgaagaatcatttatctgagtatagaattttaggttattttcttttagaaacttctgtcattgcttgtgagtcagcctcgggtctaacctcctatacattaattgtcttagccaattaattgtcctggacactgcagtgtctgatctgcrgtttaacctgtctttgaagttttaatttcaataaatagttttttttaatttgtgaaagttttatttggttctttttcaaatcattctgatctcttttgatagagtcttgttgtattcttatttttcagttccttttatgttttcaattattttaagtatattcatttctaattctctcttgtttctctctctccctctcgcaaactctgttattggatgtttttggggagtcgtatttactgtttgctacattttttgcctcttgctgtggggcctttttgtgtgagtgtgggttttgtaattttggtttataagctcatcttcagcagtacttaatctgtacccatctgcttcaattgggcttgaggaaatgaccccttgagtggttaaggatttcttctgccaggcatcctggtggcattaccaacccaggctcactttgttgttattgttgttgttgttcttgtttacttcacaccttgagagtttccagatcatgcagagaatgcaaactcaaatccaagcacttgggaaggcaggcctagagctatgaattcccaagggggtgtcttttggtttcctcttagtaccaagctgaaacagacaaactcctttaacatctttatcatcatgaggggattttttttctaatcaattttttcactgagggtatagcatgtcagagaccccagatttactggatttaccatggaggagcatggaatatcacatcttcaacttctcatcataggccaaggtctcttttcttgttcccattggctgataaacctaggtcttcatattaccaaggtctgcaagggccctggggcagtctcagcccagagctttggtcgtgagcccgctctttacttgacttctgtgagggggtccctggctctcttgggagttccacatgtttgttacagtctgcgtggtactcagaggtcatttgtcataacagggttttcagatgagcatatttcctttgtcatttgtcgtaacagggttttcakatgarcatatttcctttgtatcacccatgacatcatttgtaactcttttcttttcttccttcagagtgttttatccatgcataaagtctgtgaagcrggtaagagacatgcttgggagagccatatctggaaccagctgaatgttaaagggrtgtttctgtctctgactgctatgggcagaagccctgagctctccagctctgaactttaagttgcccaaccagggtcccctcggcatgcatagggctgactctaaccccaggcctgagcacacagcctggagttcctaccctctagggagctgtggcttcaagatcttaagcagtaagagcttggaggagtcttagagcttgtccagggcaaaatccaccctctactgataaggaccccaggattgagagcttacctctaygggggtcacctcgtgtatgcaggyggagtggagtggggcccctgcccaggtctcctccattgcagtccactggcccctctccatccaggcgccatgtttccaattcccccacctggagctcatccttgtctccctcctgggttgggtatgagtgaagggtcagagttgagatttgatttgagctcatccccatggcccctagatccagcactcttcccacaagaccttatttttgctgcagcactgtggccttgacagcattcacttgtatttttatgaataatgatgaccactgtcacttgtttgggcacgtgctgaccatctgtataaaactctggactaaccccctttagataaaatatttgtgatcctcgaagcattctgaaaaatgctactatttttaatttccaaagaggaaaacaggtctcagagggttaagtaacttgtccgaagtggctgagctggggttaaactcctctgaccctgcaggccatgctcttgtcactgctcaaagaacatctyccttccctcccccacacccacattcccttattccttcacaccswctgtcactcattcattcacccattcattcattcctcaaatgctgtgagcacaggctgggtatgaagctggggctgcatgctcagctacccagacacacgaagcagggtggccaccctcagtgagcccacagtctcacgggaggcagagcagctgggatgctcgcagaggggccctgaggtacagtgagtctggagcacccgcctggtggggaggctcagggtggcttcatcacagggtgacatcctcatcacatacccctttgatgtgtctcacaaaagcctggaatgaccagttcctgtgcctccgggtcttcgtgaatctgaaaatgccgacgggccctgttcaggcaccagcattgaggctgtgccctgtgaaattgcagtggtccctgggctgccaggggtcatcacaggccatcctctggagggactgtgcagcaccctgaagacaagagaggggtccacagtgggataccacagagggtctgtgcggcacgtgggaggtgacaggatgcagccacctggcctgggttctcttcctgccttagaggaaaaacggagcaaatccttatgaaaattccaagaatctctggcgatatctccaaagggccacagttaagctggctgggaaaggtttagacgaggggagagcaggagctgggggctggcagggtctgggatatagctgctgtgtgcctgaaaaagccggcaactgtggttggtccaggagctgtgataatagcccgtgaagtcgtggctaggtgggagggaacatcaggctccagtgtgacygtgagatcacagctttgagctttcgaggagatgggatcactctggcaaaggataagggaacaaaagatggaggcactcataaggccttgcgcaagttcagatggtctgcgagaggcaatgaggtccccaccttaaaatgcagacacctggcccggggatgggaaagtcaacaagtggctttttttgcaggaggactttttgtaaatagcccagaagagcccagcctcagcaggatggtcactgaggaggaaatccagttctatgtgcagcagttcaagaagtctggtttcaggtaaagagagcacagggcccagacacagatgagagatgatcgacagatagggatcttcagccctcagggtggagggtgaggcccagttctcctccaccacagccctcgttagtgccaggccagcctctgcttcaatgcctccagtgtcgggaggctcactactttatggtgctcagcctgctctagtttgggatagctcagcttgttcttccttatgcttatggggcccccatagggcagagggttttcactacttttyagtcatggctcctcagagaatcagatggcaactctgggctctttcttcagaaaaacataaaaatccacataaactcaaaaagtgcatacattttggtgcatttgccctacttcctgatgtcatattaggagggggcatctttgctccacctcccaatgtccctctcaagtgggctccctggggcaggygagtggcctctggatggtgaggctgctaaaccaagttccccaccatcagcaacctccccagcctccaaggtgacacgatgacattccctggagggtcctgtagggccggcttctttgtgtcccaaaagccaacctagaggctgccagttcactcagtggagtcctgtgtccttgcacaaggccttgctgctagagcttggcaactgcgcccgacagcaaggcgtgggtcctgggctctattctcttgcccctgcaggaggctttgctcttcccaggacgactggctgtgcagagcaggtttctgctggtgtctgtagcagagccgtctacttactgcctccctctttttactttctgatctctccccagaggtcctctaaactggtaccgaaacatggaaaggaactggaagtgggcttgcaaaagcttgggacggaaggtgagtgccaggttcagtgtagtctcatccacaccccaggacccgcccgcgrggcttcccattggcctgagctgatatgacctgggccagagctggttgtggacagatctgctggccacctcctttccctttggggtttgggaagtgactcccttcaggggtttccctaggatctttcttgctggtgcttctcttgggatggtagagggtgaccttggggatggagctggggtgtgtccagggaactgcagcatccatccggaatccccaggtcccctggtggtaccccaaggcagggctgcagatggcctggggcacctcccagaagtgacatggatactggagcccccagcccagaggagcgttaggtgctctcagagatgtgactttagccttcggttgtgtcaccttgcacaagtcaatctctgagtctcagtttcctcatttgtcaagcagaasatgagtttccaatctctgggtctgcagaaggagtaatggaggttcccagtttacattcaaaatgtttaaaaatctaagggaaatctgttccccagtgtgactgcacaggtagctaggccttcatcagctcactcagtagccatggttaccttgttggttcactctgtaagtgaacacactgctacrtgccagacttcctgccagaccctgggataccatggtgtgtaaacagaccaggtcttgacctcccaaaattaagtcttgaggcactagagtatataacatcgtggttaagagcaggctaggaagcacatgggctgagtctaatccctgtgtgaccctgggaaaggtacttaacccctctgatccactgtggcttcttctgcaatatgcaagtggcaagaacagtgcctccctcacagagctgtgtaaggatgaaatggttgaaggcatgtgacctgttacaagcagtactgggaacctattagctccattagtgttccttgtcattatcatcatatgaccratgaaaatgaccaaactgcagttggacagacaaaatctctcaaagcgtggaggaaaatattgacaaaggcgctgggaaggtgaatcccaatggtgctaaggtcagaaaccctcctcttctgcagtttattttttgagacagtcttgctcagttgcccaggctagaatgcaatggcacgatctcggttcactgcaacctctgccccctgggttcaagcaattctcctgcctcagcctcccaagcagctggaattacaggagtgcgccaccacacccagcgaattttttgtgttttagtagagatggggcttcaccatgttgcgcagggtggtctcaaactcctgagctcaggcgatccacccacctcggcctcccaaagtgctgggatgacaggcgtgagccactgcacccagcctctcttctgcagtttccagctggatcttcctctctcctcccccacctcctcccatcccatcctctcccccccccgccccccgcccagttcacattttagcttggaactttctagagtttacaaacctcatagaagcctcaggattcgttttagccacaaaatcatttttgaccttctcctggctcctggttgtgggaggagggaggggtgtggagagatgcccatcactctgggtgtaaatgaaaatagtgcacgttcctcaaccagggatgggtcaaagctgcttggaaattagggtaatggtggagcgagaacaaaggaaaaaacacagaggctttcctggccttcctgtgcatgcctccctgtgttcaactcatttgccagcaattggaagttactttgctgccattcatgtcacattgattactactgtggctgcccccattttctctggaaccttggtcgccccttttaagcatctatttaattcagggaagaggaatcttgatcttcattcaagggtgtcttctgccttcttggtgccatcaattcggttctcccagttacatgcagctcagcacacgttctcactcacacacatctgcacacataagacccatattggcctctgcactgctgaagctgttattttaaagatctccagtaataaccacgagtctgttrtgcaaagttcggcagatacaacgtcaggaccacagcagggtggcgagcaggggtctttcagaggaggagggagggcttcctttgtggagtgctggccacttctgtttcctgttctccccccagatcctgattccggccctgatggtcacggcggagaaggacttcgtgctcgttcctcagatgtcccagcacatggaggactgggtgagggaatggccctgtacaagggtcatcagtgcaccccgggagagggcacgggtgctcagagggaagacggcagcagaagatacaccttgtcatgtggataggaccatggttgaagcacatcatcagtaacatcactgtccccccattgcaagcagcaaccgtgactgtaccttcctttcccctgcatggatgtggggtctcattcattcattattcccttcctaaatcatgcagggtttgggcagggtggcctgmggggagcagagagaaggygtccattgcccattgcactagctagagacacacccatctgccttcttccatttacctttctgcctggggtttcctttcagattccccacctgaaaaggggacacattgaggactgtgggcactggacacagatggacaagtaaggaggttgggggctcctggggwcggggagagcagggccccccgttcaccttccataaaagctttcctggtttcattgtgctggctttggcctggcttagccactcatgtcactcacctctgccttcgagttggctgggtaggtgcagacaagtgtgaatggctatttttttcttttacttctccctttcccccaggccmaccgaggtgaatcagatcctcattaagtggctggattctgatgcccggaacccaccggtggtctcaaagatgtagaacgcagcgtgtgcccacgctcagcaggtgtgccrtccttccacctgctggggcaccattcttagtatacagaggtggccttacacacatctygcatggatggcagcattgttctgaaggggtttgcagaaaaaaaagattttctttacataaagtgaatcaaatttgacattattttagatcccagagaaatcaggtgtgattagttctccaggcatgaatgcatcgtccctttatytgtaagaacccttagtgtcctgtagggggacagaatggggtggccaggtggtgatttctctttgaccaatgcatagtttggcagaaaaatcagccgttcatttagaagaatcttagcagagattgggatgccttactcaataaagctaagatgactatgctgctggctgtctttgttcttggagaggtggagtgactgttcacggagaatgcacggcatggggatgaaccctttccctctgcttttgagccctgttctgggctccaaggtgctgtatgatctaggccgtgctggccaggagacaatcctatggggatggcagtggtgtcttgtgctctgtcccctagagcagtcactggccacaggtagccacctgcctttctcccggcttccctagcagagtttgctcaggcacaaatgtgcacctggagcatttgaaatgtgctagtgaggctgaggaagagaattttaaatttcattgaattgtaatcagtttaaagttaaatagcagcagctgccatgaggctcaggcagatccagctcatcttcccctctgccccctcctccctatcttcccctctaccctctcctgcctcctgtcacatccggttaggctcccatctcactgatgtgtctcctgcagtggtctctcccctgccctgcttccagccccagagtcctggagcagcagcctcctcacgggtcttgccgcccacatggttggatcctgaaactckcagggcctcccccaactgcccctgcccacccccagcccggccccatcaccctccaattcctaaccgccctccagcagcacacttgcaggtgctgatcctccttgaccctctgcctaacttacccattctttgcctggaatattcctcctgccacctcctccaagcccataggctgggttccgagccctttctgcctgccccccttgcatggttatcgggctcacagatgcacgcacaatggcctcgctgcttgcgagagaaagtggtccctccaagctgagtttggcatgatgacgggcatgagttggccaggtcacaagagcctgagtatctgtgtatagggagaaagccaggagaggtttgaaatggaggctgctggcatttcttcactgccctagtgcacctggagtcttccatgcaccacctctgatccttccagagagtccttcccatttaaccgagagggaaactgaggttcagataatttgcccaggactgcttggctagatgggggcagagcctggattcagaagcaggctttctggctcctaaggctgagctttttctacaaaaaaatgttctcgtcgcgccactgcactccagcctgggcaacagattgagactccgactcaaaaaaaaaaaaaaaaagagaagttctcctttctaaatctggagccagaccacctaggttaggcctccggtcagctgcatactcgccttgtgaccttgaaaaaggatatctgtgccccagttccctcatctataaaaaaggggacgttagtaggacctaactcatgggtggttgtatcaagtatgttaataatatgcacagagttctagaacagtgcttggcatggaggaagtgctatggaagtatcagctataagatttccagtttgtcttaggacaagacctctaagggctttccatttccagccatgccaccaccatctcaatcttttgcatctgagaattaaagggctaatttaaaggcaatcatgaggactgggggaaaggcttacaccagatcacattattttcctaactgggtgtattcaagctcatttgtaagggagcagttgggggaaaggaaataatcaaaacctaaaagcgtcctttactggaaggagcacaaacagcaaacctgtcttcccgaaagtctcgcttttaatattctatccagtcatctccatcagccatcaaaaaggcctcagaaattctgctcctttggcaagtaagagttgaataactccattccatagcattgccagaaaatataactggttatacaagattgagggctgtatcggtctgttctcccattgccataacgaactaccggagactggctactttataaagaaaagaggtttaattggctcacggttctgcaggctttacagaaagcatggctggggaggctccagaaaacttacaatcatggcagacggtgaaggggaagcaggcacatcctacgtgtctagaacaggagggagagagaaagagaagggggaggtgctacacacttttataaacaaccagatctcatgggaactcaccatcacgagaacagcaagggggaaatccgcccccaagatccagtcactgcccaccaggccccacttccaacatcgtggattacaatttgacgtgagatttgggtggggacagaaatccaaaccgtatcaagggccataaaggacagtggactggaagaggtctttaggtttttcaagaagatagtggaatgtccagggctatgtttcctggtctgctttgaggacctttgggccacacgtcaactgttgcagtggtggtatcagggcattccctggaacaatcagggaagattttcagatgccattttaagtacaaatggcaaggagtgtgttcaaaatgatttaattataaaatgctatattttgggattgaatttaatttgtaattaacatactagtacatattcatggggtacatagtgatgttttgatacatataatgtgtagcaatcagatcagggtaattacacatgtcatctcaaacatttatcgtttttgtattgaggacatttaataacctccttctggctatttaaaacaatgtatcattgttgactgtagtcattgctcagtgctatacaacgctagaacttactcctcccatctagctggaatttgacattccttaaatccctccctatcccccacctcttccccaacccttcccagcctcctatcctccattctactttttacttctaggaaatgaatttttttttagcttctgcatgtgagtgagaacatgtggtgtttcactttctgtttctggcttatttcacttaacagaatgctctccatttccatccgcgttgctgcgagagacaagatttcattctttttttgtggctgaatagtaaaaatatgttatttttatttcatgattacaaagggaatagattacaagtatattcccctctgctaaaagaaatcggcccttaaaaaagaggtccagcagtcttcatattctctctcacaccctccagcagtgggttgtgctgctcctgggaggaggctgagatcactcacatattctgtcaaggaaggaccacttagtggctgtcaattagcaacatccaaggtttccaggagacccgtcttctaaaaagtgagtctattagactagacaggacaaaaagctatttctgtctgtcttggggtatagggaacccacggttttagaccttgacatgactgtccaccagtttccgtgtcgttcacagccacattaccatcaacacaaattaaaagcaaacaatggttaaaatatctaggtcagaggctcaaagggtttttttccaacaggaattgggtgacaaatattatgcctcactgttcaaaggactccatctggccacaaatgataaaatactttcttgcctgagcaattgtaaagtgtcaactcctgcacccaaatgtgtaactgtctgtctccctgttagactgtgagggccctgagatcgggggctgcctgtctaagtaattcgtcctgaaacccaacccagcactggcctggcatatgtaaaatgctcattagacgtttgctgaataaattggagagtatatgcacaaatggatgaatggacaaatgcattagtttcaagttaaaataattaaaatttgatcgggcatggtggctcacatctgtaatcccagcaatttgggaggccgaggcgggcggatcacctgaggtcaggggttcaagaccagcccagctaatatggcaaaaccccatctctactacaaatacaaaattagctaggtgtggtggtgggcacctgtaatctctgctacttgggaggctgaggcagaagaatcgcttgaacccagaggcggaggttgcagtgaaccaagatcatgccattgcactccagcctgggcgacaagagggaaattccatctctataaataaataaatagcctaatgtcctcgaggttcattcatgttgtcgcatgtgttggaattttctttctttttaaggccaaataatattccattgtatgtatagaccacgttttgtttacctactcattcagcaatgggcacttggatggcttccatattttggctattatgaataatgctctgagcatcagtgtacacatatctctttagggctctgaattcagtccttttgggtatatatcaaaaaatggaatggctagattatattgtaatttctatgtttaatattttgaagaaccaccagatggttttccatagctggtttccattttctgtttttttaatatatagaatggccatgtgatgtcccatgatggttttatttgaatttccctaatgattagtgatgttgaatatctttcctttttttaaatttatttattattattatactttaagttttagggtacatgtgcacaatgtgcaggttagttacatatgtatgtatacatgtgccatgctggtgtgctgcacccactaactcgtcatctagcattaggtatatctcccaatgctattcctccccyctccccccaccccacaatagtccccagagtgtgatgttccccttcctgtgtccatgtgttctcattgttcaattcccacctatgagtgagaatatgcggtgtttggttttttgttcttgcgatagtttactgagaataatgatttccaatttcatccatgtccctacaaaggacatgaacttatcatttttgatggctgcatagtattccatggtgtctgtgtgccacattttcttaatccagtctatcattgttggacatttgggttggttccaagtctttgctattgtgaataatgccgcaataaacatacgtgtgcatgtgtctttatagcagcatgatttatagtcctttgggtatatacccagtaatgggatggctgggtcaaatggtatttctagttctagatccctgaggaatcgccacattgacttccacaatggttgaactagtttacagtcccaccaacagtgtaaaagtgttcctatttctccacatcctctccagcacctgttgtttcctgactttttaatgattgccattctaactggtgtgagatggtatatcattgtggttttgatttgcatttctctgatggccagtgatggtgagcatttttttcatgtgttttttggctgcataaatgtcttcttttgagaagtgtctgttcatgtccttcacccactttttgatggggttgtttgttttttcttgtaaatttataggagttcattgtagattctggatattagccctttgtcagatgagtaggttgcaaaaattttctcgcattttgtgggttgcatgttcactctgatggtagtttcttttgctgtgtagaagctctttagtttaattagattccatttgtcaattttggcttttgttgccattgcttttggtgttttagacatgaagtccttgcccatgcctatgtcctgaatggtaatgcctaggtttacttctagggtttttatggttttaggtctaacgtttaagtctttaatccatcttgaattgatttttgtataaggtgtaaggaagggatccagtttcagctttctacatatggctagccagttttcccagcaccatttattaaatagggaatcctttccccattgcttgtttttctcaggtttgtcaaagatcagatagttgtagatatgcggcgttatttctgagggctctgttctgttccattgatctatatctctgttttggtaccagtaccatgctgttttggttactgtagccttgtagtatagtttgaagtcaggtagtgtgatgcccccagctttgttcttttggcttaggattgacttggcgatgcgggctcttttttggttccatatgaactttaaagtagttttttccaattctgtgaagaaaatcattggtagcttgatggggatggcattgaatctgtaaattaccttcggcagtatggccattttcacgatattgattcttcctacccgtgagcatggaatgttcttccatttgtttgtatcctcttttatttccttgagcagtggtttgtagttctccttgaagaggtccttcacatcccttgtaagttggattcctaggtattttattctctttgaagcaattgtgaatgggagttcactcatgatttggctctctgtttacagtctgttgttggtgtataagaatgctcgtgatttgtgtaca

SEQ ID NO: 93671 - DNA, 15474 bp, Homo sapiens
agaatgaactgagttagaacagagagtaagacatcaggtaggtggatatttggaaagtgttgaaggaattcaggtgaaagacagtggttgcctgagctaaggcagtattggttgggatagaaaatagtggttgaatttgagaggttttaataaacagaaatgttaaagatgtggttatggaccaatgtggaagaagagtgtgacagcagagggtgaagatattctggggactctagctaaagcaattgagtgaatgcttataccacttagggatcccagtgaggcagaagatgcatgtcaccacataccttaggatgggttattgtctcaagaagctagagagccaggactgggacaaggatgaggaaaggcattgcaatgaatgtgtttgggacctgaagaggggatatcttgtccgaggagcaataaacatgaaagggcagagtaaggatcttaatacatataatttaatctcagaaatagaaaatgatggaatttgaactggccatagacttaggaacattttctcgacttctgtactcacttgtacagcacaaggaggtacaggaaatattgccttttgaagtctgatgcaaggttgctgctcaggtcagacttcacacacacaaaaaatcttatgttaaagattctggaaaggtcttttctctcctcctgtgaaaggttctttctcagcatagggtggcgcctcttgtggttggacactcctccctttgagactgccattttgtgaggtgagcacatgcctgtgcagtgctgtggagtgacggcacaaggacacagggacatctgaaagggctttgcagatttcagagccaaagggaacttctgttttttgccgggaaatattttcaacagggatatgtctctaatcaacaatgtcaatgttaactgaataatgaatcagctctaattccaaccctgattcttgtagaaaccagtatgaaattatggcacatatcctgagaactcctttcctgtctctacaatcaggtgtcttggagtctaggtgacttcagcttctatgagctggggtttatgagcagagggcacagaagatagaaagaaagctgaggagagagcctgatgctgaagtgtccgtgaaggaacctgggctgtggccaggcaaactcagaataagaatttcacaaatgtttccaagactcactgcccccaggaaacaaaagtacatgcaggggaggaatatccagctatcgtggaatgaagaggtcagcaaagctccccataaaataagtataaaactcaaacaattctcatcaaaaggcaggaattttcttttttccttaggagtacaagctatttgtttccataccaagagtaaatcacgttttcgtggctttctgtgggctgtgaacagtaatttgaattgaaattttatgcaaacacttgtttaatgcacatttcagtataagccaaaattactataattttgttactacaaaaatttttatattataccactatataagcttagttgaaagctatctcattactttatttacttatttaaaattgacaaatacaaattatatatatttatggtatacaatgtgatattgtgacattttgatatatgtatacattgtggaataattaaatcaagctaattaacatatgcattacctcacatacttaccatttggttttgacttcttttggtaggaacatttaaaatctacattcttagcaattttcaagagtaaatatattattaactatagtaatcacgctgcataatagatctcttgaacttatttctgattaaaacatgtacctttgaccaacatttccctatttcccatgcctcccttcctcaaaccacatcccagtgcttggcaattacccttctactctctgcttctgtgggtttgactttgttggattccatgaataagtgagaccatgcattatttgtctttctgtgcctggattatttcacttagcataatgtctccatgttgttgcaaattatatgatttcctttttctgtatggctgagtagtattccattttttttgtgtgtgtgtgtgtgtatgtatatacatatacatatagagaatatatatatacatatacagaatataagtcatatattcttcatctagtcatccattggtggaaacctaggttaattctgtattttggctgtgtgaataatgcttcaaggaatataagagtgaatatatttcttcaacatacagatttcatatcctttgaatttatatctagaactggaattgctagattatatggtagttctatttttaattttctgaggaacctccatactgtttgtcaaaatggctgtactaatttacattctgggttctctaaagggacagaactaataagatagatgaagaggagtttattagagagtatttactcacacaaacacaaggtaaagtcccacaataggtcttctgcaagctgaggagccaggaagccagtctgagtcccaaaacatcaaaagtagggaagttgacagtgcagccttcagtctgtggccgaaggtccaagagcccctggcaaatcactggtttaagtccaagagtccaaaaactgaagaacttggaatccaatgtttgagagcaggaagcatccagcatgggagaaagatgaaggccagaagatttagccagtctagtccttccacattcttctacttttattctagccatgctggcagctgattagattgtgcccacccagattgatgtatattaaatgctataaaaacatatacaaaatatatattccttctatgtgtgtttatatgtgtgtatgtattttttatatttattcacacatatgtttatcctttaaggtgctcttaatttcttactatggattttagttactaacaatgtcattttctctcagcctgatgacttcctttaatatttcttgtaagacaggtctgctaaccacaaaattctgtagcttttgcttatctgggaatgtctttatttcattttcatttgtagaggatagttttgctggatagagaattttgggtggaattttttttttctttcagtgcctctccattatcttctgatctccattgtttgtgatttaaagtcaggttaattgtattactcttctctttcacatgatgagtcatttttctcttgttgagaacaaatattgatttcagtatattatttgtggattttggctttctgaggtttaactataatgtatctagacatagatatctttgtgtttactgtgtttgagagatgttaagcttctaggttcttttgattaatctttttcacaactttgagaagtttgtggccattattttttctttatctttctctcccttctctctttctgagactccaattttacacatgtgggtatacttgatggtatcccacaaatctctaagtttagttacttttagtgtagaaaccatgtgcctgtacagcactgtggagtaagtcctggagcctaacaacagagtcccaaaatacataaagtaaaaatgacagaaatgaaacaaaaataaacatatcaaaattatagttggtgacttaaatcctccagtctgaaaaattgatcacaccaactagacagaaagtaaataagggtaaaagtgacctgaaaaacactacaaaactatttgacttaattgatgattttacaacactgtattcagcaacagcagaatgtacggtttttcaagtgctcatagagtatttccccatatagattatatattatataataacgtacagataagaggattaaaataattcaaagtatattctctcatcacagagggatttaattagaaataaacaacagaaagaagctggaaaaatcacaaatatttgaaaattaaacacatcacactcctaaataacttgtgggcttcagaaggaatttctagagtaattatgcttttaactaaaaaaccaaaaatatatcgatgtacatggaacgcagccataattaaagggaaatgtatagctttaaataactacattaggaaaacaaccacaaaagtttccatcataatctaaacttctacctgaagacactggaaaaataaaagtcaaccaaaagtaaacataaggaagaaataataaagatcaaattaaaaatcaattcaatagagaatagaaaaacaatagagaaaatcaatggaactacaacctggttacttgaaacgctataaaattgataacactttagtcagactgaacaagataaaaagcaagaaaatagaaattgcaaagtcaggagtgaaaatgaagaatacaattagtaaccctatagaaacatatggaaatgttatgaacaacactatgtcaatgaatttgacaacttggatgaagcagacatattcctagaaagacataagagtaactgagaaaaaaagccacatgtctggatagacatattacaagtaaagaagtattttagtaaataacaccatacagagaagaggtcagcaaaatttttctgtaaggagctaggtagtaaatattttgggccatatgcaacctctgtcagttctttttctcctattcctcctcttccgtcttctaacactttaaaagtataaaatttattcttagtttatttatgagtcatacaaatataggccatggcttgactttaacatgtgagcaatagtttatcactccatgtcatagagaaaagctcaggactagctgactttactggtaaatcccatcagatatttaaataataataccactcctacaaaaaaaaaaactttcacaaaataaagaataagattattcctaaattcatcccagttcagtccacaatttcctaattcagcctaacaggtcagaattactttgatactaataaaagaaatcacaagaaaactacaaactagtatgtctatggtctccataaaatattagcaaacctcatttagcaatatataaaacgattatatactatgaccaagtgggatttatcctgccagtggaagattggcttgacatccaaaatcaactaacgtaatataccatattaatagaataaaaaacatatcatattatctcagtgtatgcaataaaataaatttgacaaaataacctgtacccaatcataataaaatctcaacaaattatgaacagactgaactttctcatcctgattaacggcatgaaaaaacactcaccttaaacatgaaagcttcaaaagactgaatgctttgcctataattttggtagcaaagtaacaatgtctgttttcactacttttattcaaccttgcactggagatatcagacagtacagtcagataagaaattgcaataaaaggcttccaggttggaaaggaaaaagtagaactctttttaatctccgactacatgatcctgtatgtaagaaaaacaaaaacaaaaacaaaactcctgtgaaatctacgaagaaacttctataactaacaaatccatttagcaagatgtcaggatacagtatgtataacaaaaatcatatgtgttctaatactagtaataatccaaaagtgaaattaagaaaaatatttttatagttgcagtatagaaaatagcactttgcaatatattaaacaacagaaatataagacctatacatagaaaaaatataaaatgctgagataagttttaaaagatgaaaaagaatggaaaaaacattccatgatcatggaggactcagtattgttaagatagaaattatctccaaatttatcaataagtacacggcaatccttgtcaaaattctagtagtaccttttgtagagattgactagctgatcctaaacctatatggtgatacctaggacttgaatagtcaaggcaattttgaaaaagaaaaacacaattaaaagacttacactagccaattttaaaacatacgataaagctgcaataatcaacagagtgtggtattaacataagatcaacatagattacgaacctagaagatgctctcctctcagaagctgcagccgtgatggaagtttgaatgttgagccgctgtgaggcgaggccgggctcaggcgagggagatgagagacagagacggcggcggcggcggcggcycggcccggcccggcctgaagcccctctcagcaacccgtgagcatccgcgggggcggcgccggcagcggcggcgtttctcgcttcttcttcgtcttttctaactgtgcagcctcttcctcggcttctcctgaaagggaaggtggaagccgtgggcttgggcgggagccggctgaggcgcggcggcggcggcacctccccctcctggagcggggggagaagcggcggcggcggcgcccccggtggccccggcggctgcagctccagggagggggtctgagtcgcctgtcaccatttccagggctgggaacgccggagagttggtctytccccttctactgcctccaacacggcggcggcggcggcggcggcggcggcacatggagggacccgggccggttttaaacctctcgtccgccgccgccgcaccccccgtggcccgggctccggaggccgctggaggaggcagccgttcggaggattattcgtcttctccccattccgctgccgccgctgccaggcctctggctgctgaggagaagcaggcccagtagctgccaccatccagcagctgctgccgcagccattacccggctgcggtccagagccaagcagcggctgagcgaggggcatcagctaccgccaagtccagagccatttccatcctgcagagccccgccaccagcagcttctgccatctctctcctcctttttcttcagccacaggctcccagacaggacagccatcatcaaagagatcgttagcagaaacaaaaggagatatcaagaggatggattcgactwakacttgacctatatttatctaaacattattgmtabgrgatttcctgcagaaagacttgaaggcgtatacaggaacaatattgatgatgtagtaaggtttttggattcaaagsataaaaaccattacaagakayacaatctttgtgctgaaagacattatgacaccrccaaatctamttacagagttgcgyaatatccttttgaagacyataacccacmayagctagaacttatcaaacccttttgtgaagatcttgacyaatggctaagtgaagatgacaatcatgttgcagcaattcactgtaaagctggaaagggacgaactggtataatgatttatgcatatttattacatcggggcaaatttttaaaggcacaagaggccctagatttctatgggkaartaaggaccagagacaaaaaggdagtaactattcccagwyagaggcgctatgtgtaktactakagctamctggtaaagaatcatstggattatagaccagtggcactgttgtttcacaagatgatgtttgaaactattccaatgttcagtgkcggaacttgmaatcctyagtttgtggtctgccagctaaaggtgaagatgtattcctccaattcaggacccacacgatgggaggacaagttcatgtattttgagttccctcagccgttacctgtgtgtggtgatatcaaagtakagttcttccacaaacagaacaagatgctaaaaaaggacaaaatgtttcacttttgggtaaatacattcttcataccaggaccagaggaaacctcagaaaaagtagaaaatggaagtctatgtgatcaagaaattgatagcatttgcagtatagagcgtgcagataatgacaaggagtatctagtacttactttaacaaaaaatgatcttgacaaagcaaataaagacaaagccaacygatacttttctccaaatkttaaggwgaagctgtacytcacaaaaacagtagaggagccgtcaaatccagaggctagcagttcaacttctgtaacaccagatgttagtgacaatgaacctgatcattatagatattctgacaccactgactctgatccagagaatgaaccttttgatgaagatcagcatacacaaattacaaaagtctgaatttttttttatcaagagggataaaacaccatgaaaacaaacttgaataaactgaaaagggacctttttttttaatggcaataggacattgtgtcagattaccagttatagaaacaattctcttttcgtgaccaatcttgttttaccctatacatccacagggttttgacacttgttgtccagttgaaaaaaggttgtgtagctgtgtcatgtatatacctttttgtgtcaaaaggacatttaaaattcaattaggattaataaagatggcactttcccattttattccagttttataaaaagtggagacagactggtgtgtatacgtaggaattttttccttttgtgttctgtcaccaactgaagtggctaaagagctttgtgatatactggttcacakcatacccctttgcacttgtggcaacagataagtttgcagttagctaagagaagtttctgaarggttttgctgcattcttgcatgtatttgggttaggggaatggagggaatgctcagaaaggaaataattttatgctggactctggaccatataccatctccagctatttacacacacctttctttagcatgctacagttattaatctggacattcgaggaattggctgctgtcactgcttgttgtttkcgcatttttttwaaagcatattggtgctagaaaaggcarctaaaggaagtgaatctgtattggggtacaggaatgaaccttctgcaacatcttaagatccacaaatgaaggratataaaaataatgtcatagataagaaacacagcaacaatgacttaaccatataaatgtggaggctatcaacaaagaatgggcttgaaacattataaaaattgacaatgatttgttaaatatgttttcttaattgtaacgacttctccatctcctgtgtaatcaaggccagtgctgaaagtcagatgctattagtacctacatcagtcaacaacttacacttattttactagttttcaatcatatacctgctgtgaatgcttcatgtgctgcctgcaagcttcttttttctcattaaatataaaatattttgtaatgctaaaaaaaaaaaaaagaacatagaagacaaacatcagaaataaacccatccactatggttaactcatttttgaatatggtgtaaagtcagtttaatgatgaaataatattattttcaacaaatagtacagaaattaaactatgcaaaaatactattaataatgatgttggatcattacctcacaccatacccccaaattaactcagaacatggcatacaccaaatataagagcaaaaactatgaaatttctagaagaagacagaaaaaaaattatgactttggcttagttgtttcttagaagtaacaggaaaagcataattcataaaagataaattgaaaaatcggacgtcatcaaaataaaaaatggtttatcttcaaagtcacctgttaagaaaatgagaagacaaatcataaagcagggagaaatttttgaaagtcatgtatctgataagggacagttaaaactaaataaaaacacaaaccatccaattaaaatgaataaagggttcgaataggtatgtcatcagagatcatataggaataaccaataagcaaacaaaagatgttcaatatcattagttattagagaaacaaaatttaaaaaccacaatgagatgacactacacatttgccagaatgatgattattaaaaaagaccaagtattggagaggatgtgaaaaaactggaacctcacacattgacgatagaaatgtaaaatgaaatagccaattcagaaaacattttacaagttttctttgtttttgtttttaatttattatacccttaccctatgactcagtaattccacttctagatacctaccaaataaaattaaagtttataacttcacaaagatttatttattttattttttattttattattatactttaagttctagggtacatgtgcacaacatgcaggtttgttacatatgtatacatgtgccatgttggtttgctgcaccgattaactcgtcatttacattaggtatttctgctaatgctatccgtcccccacgccctcactccatgacaggccccggtgtgcaatgttccccgccctgtgtccaagtgttctcactgttcaattcccacctatgggtgagaatatacggtgtttggttttctgtccttgtgatagtttgctcagaatgatggtttccagcttcatccatgtccctacaaaggacatgaactcatccttttttatggctgcatagtattccatggtgtatatgtgccacatcttcttaatccagtctatcattgatggacatttgggttggttccaagtctttgctattgtgaatagtgccacaataaacatacrtgtgcatgtgtctttatagtagcatgatttgtaatcctttgggtatatacccagtaatgggatcactggttcaaatggtatttctagttctagatccttgaggaatcgccacactgtcttccacaacagttgaactagtttacagtcccaccaacagtgtaaaagtgtttctatttctccacatcctctctagcatctgttgtttcctgactttttattgattgccattctaactggttgtgagatggtatctcattgtgattttgatttgcatttctctgatgactagtgatgataagcattttttcatgtgtcgttggctgcataaatgtcttcttttgaaaagtgtctgttcatatcctttgcccactttttgatggggttctttgattttttcttgaaaatttgtttaagttctttgtagattctggataacagccttttatcagatgggtagattgcaaaaattctctcccattctgtaggttgcctgttcactctgatggtagtttcttttgctgtgcagaagctctttagtttagttagatcccatttgtctattttggcttttgttgccattgcttttggtgttttagtcatgaagtctgtgcccatgcctatgtcctgaatggtattgcctagattttcttctagagtttttatggttttaggtctaacatttaagtctttaatccatcttgaattaatttttgtataaggtgtaaggaagggatccagtttcagctttctacatatggctagccagttttcccagcaccatttattaaatagggaatcctttccccatttcttgtttttgtcaggtttgtcaaagatcagatggttatagatgtgtggtgttctttctgaggcctctgttctgttccattggtctatatctctgttttgataccagtaccatgctgttttggttactgtagccttgtagtatagtttgaagtcaggtagcatgatgcctccaggtttgttctttttgcttaggattgtcttggcaatgtgggctcttttttgattccatataaactttaaagtagttttttccaattctgtgaagaaagtcattggtagcttgatggggatggcattgaatctataaattaccatgggcagcatggtcattttcacgatattgattcttcctatccatgagcatggaatgttcttccatttgtttgagtcctcttttatttcattgagcagtgatttgtggttctccttgaagagatccttcacatcccttgtaagttgaattcccaggtattttattctctttgtagcaattgtgaatgggagttcactcatgacttggctctctgtctattcttggtgtataggaatgcttgtgatttttgcattttgattttgtatcccgagactttgctgaagttgcttatcaacttaaggagattttgggctgagacaatggggttttctaaatatacaatcatgtcatctgcaagcagggacaatttgacttcctcttttcctaattaagtacactttatttctttctcttgcctgattgccctagccagaacttccaacactatgttgaataggagcggtgagagagggcatccctgtcttgtgccagttttcaaagggaatgcttccagtttttgcccattcagtatgatattggctgtgggtttgtcataattagctcattattttgagatacattccatttatacctagtttattgagagtttttagcatgaagagctgttgaattttgttgaaggccttttctgcatctattgaaataatcatgtggtttttgtctttggttctgtttatgtgatggattatgtttattaatttgcgtatgttgaaccagccttgcatgccagggatgaagcccacttgatcttggtggataagctttttgatgtgctgctggatttggtttgccagtattttactgaggattttcacatagatgttcatcagggatattggtctaaaattctctttttttgttgtgtgtctgccatgctttggtatcaggatgatgctggcctcataaaatgagttagggaagattccctctttttctattgattggaatagtttcagaaggaatggtaccagctctttgtacctctggtagaattcggctgtgaatccgtctggtcctggactttttttggttggtaggctattaattattgcctcaatttcagaccctgttattggtctattcaggtattcaacttcttcctggtttagtcttgggagggtgtatgtgtccaggaatttatccatttcttctagattttctaatttatttgcatagaggtgtttatagtattctctgatggtagtttgtatttctgtgggatcagtggtgatagcccctctatcattttttattgcatctatttggttcttctctcttttcttctttattaggcttgctagcggtctatcagttttgttgatcttttaaaaaaaccagcttctggaatcatcgatttttgtaagggttttttgtgtctctagctccttcagttctgctctgatcttagttatttcttgccttctgctagcttttgaatgtgtttgctcttgcttctctagttcttttaattgtgatgttagggtgtcaattttagatctttcctgctttctcttgtgggcatttagtgctataaatttccctctacatactgctttaaatgtgtcccagaaattctggtacattgtgtctttgttttcgttggtttcaaagaacatctttatttctgccttcattttgttgtttacccagtagtcattcaggagcaggttgttcagtttccatgtagttgtgcggttttgagtgagtttcttaatcctcagtttgaatttgatttcactgtggtctgagagacagtttgttataatttctgttcttttacatttgctgaggagtgctttacttccaactatgtggccaattttggaataagtgcaatgtggtgctgagaagaatgtatattctgttgatttggggtggagagttctgtagatgtctattaggtcggcttagtgcagagctgagttcaagtcctggatatccttgttaaccttctgtctcgttgatctgtctaatattgacagtggagtgttaaagtctcccattattattgtgtgggagtctaagtctctttgtaggtctctaaggacttgctttatgaatctgggtgctcctgtattgggtgcatgtatatttaggatagttagctcttcttgttgaattgatccctttaccattatgtaatggccttctttgtctcttttgatctttgttggtttaaagtctgttttatcagagactaggattgcaacccctgctttttttttgctttctgtttgcttggtagatcttcctgcatccctttattttgagcctatgtgtgtctctgcacgtgagatgggtctcctgaatacagcacactgatgggccttgactctttatccaatttgccagtctgtgtcttttaattggggcatttagcccatttacatttaaggttaatattgttatgtgttaatttgatcttgtcattatggtgttagctggttattttgcccattagttgatgcagtttcttcctagcatcgacggtctttataatttggcatgtttttgcagtggctggtaccagttgttcctttccatgtttagtgcttccttcaggagctcttttagggcaggcctggtggtgacaaaatctctcagcatttgcttgtctgtaaagaattttatgtctccttcacttatgaagcttagtttggctggatatgaaattctgggttgaaaattcttttctttaagaatgttgaatattggcccccactctcttctggcttgtagagtttctgccgagagatccgctgttagtctgatgggcttccctttgtgggtaacccaacctttctctctggctgcccttaacattttttccttcatttcaaccttggtgaatctgacaattatgtgtcttggggatgcttttctcgaggactatctttgtggtgttctctgtatttcctgaatttgaatgttggcctgctttgctaggttgaggaagtcctgaataatatcctgaagagtgttttccaacttggttccattctccctgtcactttcaggtacaccaatcagacatagatgtggtcttttcacatagtcccatatttattggaggctttgtttctttttactcttttttctctaagcttctcttcttgctttatttcattaatttgatcttcaatcactgataccctttcttccacttgatcgaatcagctactgaagcttgtgcatgcgtcacgtagttcttgtgccatggttttcagtccatcaggtcctttaaggtcttctctgcactgtttattctagttagctattcgtctaatctttcttcaaggtttttagcttccttgtgatgggtttgagcgtcttcctttagctcggagaagtttgttattactgaccttctgaagcctacttctggcaactcatcaaagtcattctccatccagctttgttctgttgctggtgaggagctgtgatcctttggaggagaagaggcactctggtttttagaattttcagcttttctgctctggtttctccccatcttttttttttttttttaattgattattcttgggtgtttctcgcagagggggatttggcagggtcgtaggacaatagtggagggaaagtcagcagataaacaagtgaacaaaggtctctggttttcctaggcagaggaccctggggccttccgcagtgtttgtgtctctgggtacttgagattagggagtggtgatgactcttaaggagcatgctgccttcaagcgtctgtttaacaaagcacatcttgcaccacccttaatccatttaaccctgagtggacacagcacatgtttcagagagcacgggttgggggtaaggtcatagatcaacagcatcccaag

SEQ ID NO: 93672 - DNA, 110074 bp, Homo sapiens
  misc_feature (1)...(110074): n = A,T,C or G
gatggaaggatcacttgagcctgggaggtcgaggctgcagtgagctgtgattgtaccactgcactccagcctgggtgacagagcaagaccctgtctccaaaaaaacaaacaaaaccccacaactcctcaaaagagttgtctctacttactgtctcaaattcctttcctctcaagctaatataaacctattccagtcaagccttcacccttcccatcccattaaagctgttcttgtcaaagtccacaatgatcctggtcaattttcaacctttatctttcttgagccatcaggagcatttgacctggttgatcattccctcctgtttgacaaacctcctacacttggctttcagataaccactcccctagttttcatcccatctccctggaagtgctcctcagtctccttcactggttattccctcgcttctcaacctgttaataataaaataccccaaggcttcatcttcggtctctttcctttccacagccaccctgtttcgtagctttcaatttcgttcacataccgatggctctcgactgatatccagtgtcaacctctttcgtgtcttcctgttcactagtcatccgaaaatacaagttcaaaccaatccccgccagtcccttgaaacacctctccacctaattttctccatttcatctaatgataactacatttttccagtcccttggtcaaaaagctttggtgtcacatttgatgttgctgtctgcctttcatattccacatctgatctgtcaaaaagtcttgttgaaatcttcaaattatattcagaatctgaacacttctcaccaccttcactgctgactaccccgatttgagtctcaataatctctggcctcattcagtggttcctaagttttgctgcacgttggaataacccaggatcttttaaacatgctaatgcctgactcccaccccttgatattctgatttaataggtgtgggatgtaatctgggcactgggaatttttcactgctctccaggtgattccaattgcagcaaagtttgggaatcattggcctggctatggtaaccgccacccacctgatctccccacttccacaccaaccccctcccacagtctattctcaatgcagcaaatagacatgcttttaaattacagatcagatccattcaattctctgctaaaaacaccagtggctccccatctcaattagggtaaaagccaaaggcttttcaatggcccacaaggtgttacatgagctgcactgccccctgtcccatgcgccactcctctgacctctctttcacattgcctcacccactgctcccgtgatgtcagcctcctcagtctccttgaacaccccagacatcctctcacctaggactttttttcttttttgagatggagtctcgctctgtcaccaggctagagtgcagtggtgtgagatctaggctcactgcaactgccacctcccaattctcctgcctcagcctcccgcgtagctgggagtgcaggcgcgtgccaccatgcccagctaatttttgtattttcagtagagacagggtttcaccatgttggccaggatggtcttgatctcttgaccttgtgatctgcctgcctcagcctcccaaagtgctgggattacaggcgtgagccactgcgcctgaccttcacctaggacctttgcactaaccattatcttagccagaaatactctttcccacatatctacacatcaagtattagctcaaatatcacattgtcaataaggcctactgtaacccctatttaaaattatacctttaaccacctatctccctcccctctctgagataaaacagggaagaggtagaggatggtgccattagataaggaagagcagatctggagtaataatagagttctgtttgggacatgttaagtttgagatgcctattagacacccaaatctaacaagatatcaaataggggaaaagttggggttggactggaaacctgggagcaaacacgtggtgctctggggatcaccttggagagacaaggctgagtgacccccatggaacactagtattctgaggtgaggcagagacagagttcacaaaagaaagagaagagaaaccaagagagttggagggccctgtcataaaagatgttcatggaagagttgacaaaaagagtcaaactctgtaaaatacttgaagagatttattctgagccatgattgaccaactgaggcaagacaggcaagctccaaaattggggctttgcctgggagggttcttggctttgcccaggaaacaattcaagggtgagctgatggtgttaaatagcaacttgcattgaagcagcagtgcacagctgcagcagagggactgctccttgccgagcagggctactcacaggcagtgcccagaagagcagctcagaggcagttctgcagtcatatttatacccacttttaactgtattcaaattaaggggcaatttacgcagaaatgtcaagaatgaggatggtaacttccaggtcatcaggtcattgccatggaaaggggagggtaatgttcaggtgttgccacggcaatagtaaactgacatggcatactggtgggcatcttatggaaagttgcttccacccctgccctgtttcagctagtcctcaacttgatccagtgtccaaactctgcctccagaacagagtcccacttcctacctcacatggtctgtgacagagccccaggggatcctgagaacatgtgtccaaggtggtcaggttacagcttgattttatacattttagggagttataagacattactacatgtaagatgtatattggtttggtccagcatggaggaaaagttaaatattaaatctgaattcaattgaacctggacacaaacaatagtcaccaagtcctggaacaagttttgtgagtcccttgaggctttcatccagcgctgtttcagagaaatctctatttcaatctattcctatacattagttattgaaaaacaatagacaatagcaaaaacaagttgacctttttgtgttccttgagcctggttgtgaagggcccttgtgactgggcctcatgccaaacaacttgttacaaaaagagctagggtcccaggcccagccgaagcttcaggagacctatcctcatctgtgcaaggaggagtggccaactctggagcccaggctgttgcttcctggtctggtggtgaatcctccatagtctggtgagtgtagtgcccaactctggagcccaggatgttgcttcccggtctggtggtgaatcctccatagtctggtgagtgtagtgtccaagtctggaacccaggctgttgcttcttggtcttgtgataaatcctccatagtctgatgggtgggtgtgtgtgtgtgtgtgtgtgtgtgtgtgtgtgtatacacatatactttcccttctacccttcccattgcaatttgcttattatatctgcattgccatttacatgggataaaggtcgtttacccttaaaggtattgtgtatgtgtcttttcttctcccctcacgcatatcccacagagaacaaccagaaaggtgggacaactcaaagcattgatgtggggtcagggggcaacactttcaggtcacaggcagattcagttttctctgactggcaattggttgaaagagttattatctatagacctgaaatgaacagaaaggaatgtctgggttaagacacagagttgtggagactaaggttttatcatgcagaggaagcctccaggtagcaggcttcagagagaatagattgtaaatgtttccttttttttttttttttttttgagccggagtctcactgtgtcgcccaggctggagtgcagtggtgcaatctcggctcactgcaagctctgcctcccgggttcacgccattctcctgcctcagcctcccaagtagctgggactacaggggcccaccaccacgcccggctaattttttgtatttttagtggagacggggtttcatcatgttagccaggatggtcttgatctcctgaccttgtgatccgcccacctcggcctcccaaagtgctgggattacaggcatgagccaccgcgcccggccgtaaatgtttcttatcagactttaagagtcggttctgtgctctatcagccttaaggtctctgtgttgatgttaacactggttagcagctcctgaattctaaaaaggaggagggaataaggaggcatgtccaaccccacttcccatcatggcctgagctagtttttcagtttaactttggaatgccctgggctgagaattattttcggtttacagaggagaacttatgttcattggtataggatgacaatgaggtcagacaaataccactgaacttggcaggctgggaagttacaaagcttagcaaggccagtttcagtgtcatagtggggtcaaagcctcgttgttgcctcaattctagtagggtacatattcctgtctttattaatgggagaggttcttaatctccagcccatggacaaaggagatcatagatgggtttcaggaaaacatcccaagtcctgcctccaaattttgcaaaattttgtgcctgtgtatttttctggagaacgtaaaccaaacagtgtctgagacaggtctcagtctggaggtttattctgccaaggttgaggacacacccaggaaaaagagacataagttatcatggaatctgtggcctgtggtttttccaaagagggttttgaggacttcaatatttaaagggaaagagcagacagaaggggaaagaggaacaactatgcattcatttcacactcagtaaatctgccttttacagaagacaaagtaaacatagaggaaggagtcaaatatgcatttttcttggggtggactgaagggtgatttctagtcttgtccttgtcccctacctactgtaaatttgcatggtcagggtggaattcaacagaagtgttgtaaggtaaagactctgccactcacaaggaatttccctgtgagcaactcctctgggaggccacctagggagatatgtgggcttctgtctttgcagctgtttaggaacagaaggaaggcagtttttgcgtgactcagttcacaagcttaactttttgttgttgttgttgttgagacagggtctcgctctgtcgtctaggctggacaacagagaatgatctccactcactgcaacctccacttccgggttcaagagattctcctgccttagcctcccaagtagctgggattacaggcgtgcaccaccacgcctggctaatttttgtatttttagtagagacagggtttcaccatgttgaccagggtggtcttgaatgccagacctcagatgatctgctggccttggcctcctgagatgggcatagtgctagtattacatgtgtgagccactgcgcccggccctaagcttaacttttttctttggcagagtttagggtcccgagatgttattttccttccacaagagacatccacagctttcacgatggttaccgatcatatgtgccattcatctaagaccaaggtgaccacctggtcccaaagcctgcacctcggattcttactcgattcccgcctggtctcttccaggccctcagttagtttccacaacatgggagggttcctcctccgtggtctcgcccattcgcgttcccacccaccctccccggatgtgacgaccctgggctcccactcccccccatgagagaccatccacttccaccctttcacttaggcttcctggcgcagcctctatccaggaactctgtcccatagctgtactgcccaggtcgagctttctaaccccaagatgccactccgttcagacgttcccatcctccatccctgagacccggggcaggatcgcagcctaggggcctcacgggccgcctgctaccctgttagttgcaacacggggcggggcgtggctttgtgcacgtcggcttccgggaagagctttacgatacattgaccgacattttacgacaggcgggattgttttgtggctgtcagctttcyccgtggtctgagtttgtggctgcatttttatctctggtggctctgctacggcggcgcagaaatgaggcagaagcggaaaggtgcgaaaggggaaggagatgggggaaaggggtggtccgaaaggggcgaacgcccaggcaatcaaatgctgaaccgaacttttaccgcgagaatccgctacccagtccagtcgccccgccacctagggtcagtgtgtccattctggtccccgagccttctcgtttttcctgttttgctttttgaagcaccctacccttcctctcttcctctttggcagtcacgtggtgtcttgtttgaatggcagggaaaccattattccaatatatgccctccraggagttaacgtcgatttaacgggttgtaggacttttcatttgttaagatttgtttcacgacacatttgacgtgttagagagtttcttttaaagccttattttaagatattaaaaaaaccttaattatccttggattcagtgtaagagttgtgcatgcaattattcccatttttattacatcatgagttagcaatgaacaattccacctttggtttttcaacaggacggattcaaatttgaaatattctctcacaggttctgttcctatttctgtatctcacaggttctgttcctatttcatttgaccagctggtctaatcatggtaattgttgtcagaataatagctaccatttattgagcttgtattttgaagtcggtatcatttccattttacagatgaagaagctgagattcaaagagttaagtaactttcccagaccaaaattatacttagatatggagctggctggtcaggctgtatctgtgacctcaaaaaacataaaatgaaaaataaatacatcgttaatcmctatgcttcttgacattaactgttatttttctttcttccaagcaacaattctaagtgtccaagttaccttagattaagtcttgtcatatttgcatgccctaaattaatttgttatctcactctaacttgctccttctcaatctaccaggattcttttagyttcttctgtcaccaagtcatgttgattcttacttagaaattacttcttgatatagtttattcctcttcattctggccgccaacctcctaacccaccttcatcactaactaatatttgaatggtatttcagctttcatatacattatttatttgagtcttagaatggttttgtgaaatttggatgtattaccccaattttacagacaaggaaatgggcactcaaaagttgttgatcttggccaggcgcggtggctcatgccggtaatcccagcactttgggaggccaaggcgggtggatcacttgaggtcaggaattggagaccagcctgaccaacgtggtgaaaccctgtctctactaaaaacacaaaaattagccgggcgtggtggcaggtgcctgtaatctaatcccagctacttgggaggctgaggctgaggctgaggcagaggcgggagaatcacttgaacctgggaggtggaggttgcagtgagccgagatcgcaccactgcactccagcctgggtgaccgagcaagactctgtctcaaaaaaaaaaagaaaaagaaaaaaaattgtcgatcttttccgttaccacacagccagtaggcattgggactggatcctgtcttagattttgtgggttttttaaaacaatgttgcctttcaagagccatttgagtagtatccatattatatgtattctttttcactttctgaatcattctttgtaccgataatattcttaccttccttaaacgttactttcaactttttatttccaaagttgagaatatgcaattcttcactgtctgttgcattccatttcaatgcctttgcctagtggccagggtcccctgtaatctgttctttattacaccctgttagaaagctggattttagttaggctgtgctgtttcacacaaagataggtaattcctatgcctgacattatttcttctggattgccttctgttttgcatgtccaaatcttgccctatctttaaagatccctgtgccatttccttcatgaagtcttttcctactcatttactcttccagttcttgatacactcaagagctatacaagtggtttccaaatcttatctgttcttatcagccgatccccttttaccctccaaataaattcttacacagaacctcaatatataaacagctgaaagcagagctgctgtggtggaaataaagagacctcctcctttttttcctccatgccttattttcctcttcccttctcccttcctctgccatgaccaccaccagtcctacctctgttgcatggcccctgaggcacctttgtagaactctggaagtgctgagttacatggtttggaaagcatttagcctttgagtatagatggactttatttctctcaaaaattgttgtgtmtatgttagccttgcctcattaaattagatgcagtgtgttacagtgaaaaaagcatggaagttgtggtgaaaagagctggatttgagtcttggctctgctgtttacgatagcttgttaacttgccttagcctcatttttcacatctataaaatgggataacagtacctaccctccgtgttactgtaagggttcaaatgagataaagtaaatgtgtgggctccataattgccagggccttccatccacgctttcattatgttttagctttctctgcagtgtgagtcctcagccccctgggccacggaccagtaccggttcatggcctgttaggagctgagccagacagaagaaggtgagcagcaggcgagcaagtgaagcttcatcagtatttgcagccacttcccatcactcatgttactgcctaagctctgcctcctgtcacatcagcagtggcattagattctcaaaggagtctgaaccctgttgtgaaccgtgcatgtggtgggtctaggttgtgtgctccttatgagaatctaatgcctgatgatctgtcactgtctcccatcacccccagatgggagtgtctagttgcaggaaaacaagctcagggttcccactgattctatgggaacagaattcgttatggtgaattgtataattatttcattacatataacaatgcagtaataaaaataaagtgcacaataaatgtaatgcacttgaatcatcctaaaaccaccctgctcccctggtctrtggaaaaatcatcttccataaaaccagttccttttatcaaaaaggttgggaaccactgctctacaggtgagaagcttgcttgctgacagcttccaagctgatatcccacagcttttgtccctggaaaaagactggcattttttaccttgaagaaaagagctcagattggcctggcttagagatatgcccatccttgaaccaatccttgaactgtgcttgagtggatggcgtcatacaagaacctgtcagcttctgctgttgcctttggatgagaccgagagccccagttgccagaagttcatgatggtggacagacaatattttagaaatgcattaagattcttaggcagatacctgggtttgagtttcaactttactccttgatagcatcttcatgtaacaggcacatattcttgttctgtctacctctgttctgagaattacctgaattcatgcatctaaatgttctttatgaactctaaagtattatgcacatattagtaattacacctctggagataaagggaagagaattactttggtcctttcctgtgtgattaagttctttctcctcacattgtttctactyctgtatcctttcctgtatttatttttaataatctcatagagtatgtgcttctaaagggagcttttcccatatatatgtaaagccacgtttgttttaaagatacaaaagatatgatcaaattgtaaacagtagagatttagcatcttctgaacttgagctattcatttggcatatttgtatggtttcggatggaaaactgctactaaatcagattttaaaatcttgattgaatgatacgatttttgacattgttgaatattaactttccaggagatctcagccctgctgagctgatgatgctgactataggagatgttattaaacaactgattgaagcccacgagcaggggaaagacatcgatctaaataagtaagtggatataaagagagagcaagcttgttcttaggtagcagatctcttttatgaaattatctagtactacttgttttccagctcaagttttattttagttgagaattttagctttctgccttgccttgtcattcatttctttttttttttttgcaagttccgcctctggggttaacgccattctcctgcctcagcctcctgagtagctgggactacaggcgcccgccaccacgcctggctaattttttgtatttttagtagagacggggtttcaccgtgttagccaggacggtctcgatctcctgacctcgtgatctgcccacctcggcctcccaaagtgctgggattacaggcgtgagtcaccgcacccggccgtcattcatttcttgatggcaaaattgtctcagcttaagaatactaatagcttctaacatttattgggcacttactgtattccagacactgttgctaatgcattgtatgtattagctcagttaatcccctcaaaattctgtgagataggtactgataccagccacacttgacaggtgggtaatctgagtcagagagcagttaaataatttgtccaggggtaagtaactagtaattggcagagctgggatttggaattaggtcagccgtctccagagcccatgttcttctgtgctgcatcgctgcacatcctactttccttccctactgtctcagctgaagcagcagctttctgtcaggaaaaccctccctttggggcccctgatctaatccaaccctcccctgctgtagaacctctttgacacattcatccacttcctctccataatcattttcagcttggactttcctacagtctcaaataagagttgtctttcatctctgcatctattttttttttcaaactataatatatattcactctatgtagatcttccctaatgaaagggttctctccccaaccccaggtcgtctaatcatcacatacaggaatgaccttttcttagactctcttctctgatacttgagatgctgcaatattttaccccttccttgaatcctcatgcttagtaaatatttgctacaggaataagtaaatatcctcttttgactataaagttattgtattttactgatttttctaccgtgtctttagaagtttttctttctttttttgttggttatacccctgattatacaaatctttaatttctagtgaacatttctacatcttatatatatttgttgttctctttaatttagcacatctaaagctaaagctgccatcgtccttaaaactcgcccctcctcagatgtcaccagcctattactggaaggtctctcagtctggcttcaacctgcttttccaagtttttaaacctctgtacctttacattgaaaatcttctgctttctgtcaagttggtctgcttgtatttcttaaaatatatgcattcctgtttttgcatctgcacataaatcagcctgtctgccctccatgtcatctttgtgtctttagtgactgagacctactctttcttctgtgctcatttccatgaatatctccccagcacacatcagattcctccctgaactctggaagcattcattgttggtatgtgtgtgtgttttatgacatatgttttaatcatttatacattaattttcttggtacgcctgtctgcaaacatgtaaacatagaacatgaaaggactgtgccttgcacatttgaacatagcaggtattcaggcagcctcttgtacgtgttaggtmctcagttaatatttgttgacaaatatgtgagcacttcacagatatttctagatggattaaagttagaagacagggtgactgttaagagtttggctaggaggcacaaagaaaagctggtaaaagttttttttaaactttcaaaaatatgtactttatttcctatttggttctgcatagccatccttgattttttttttaattgttgttgttgttttgtctaagacagtagttgtcaaccaggggtgatttcctcctcaggacatttggcaatgtctagggacatttttgagtgttacaacaggaagacaagaagaaggctggtagtacatagagaccaaggatgctgctaaacatccctcaattcgctggccacctgccacagcaaagaactgtgtggtcccaaacatcagtagtgctgaggttgagaaaggtggagtcagaatagtcctttgaagctgcagcactattctgaactagatctatattgtgtcatcgtccagggacccttctccctccatagtcctctggttttctttctggtactcaagggtgggaagtagtcattcactcgtgaattttattcttctatttccctgatagtcacagatcttaaaactatccttgtcacgtggtgaagggattggagagtgacagttgttaatgatgttgtttatagatcatcctcttggtagcttgtccttaaataaccgtratcttgataatgtgagatgctttactttcagggtgaaaaccaagacagctgccaaatatggmctttctgcccagccccgcctggtggatatcattgctgccgtccctcctcagtatcgcaaggtcttgatgcccaagttaaaggcgaaacccatcagaactgctagtggggtgagtgattcgactcatgaggtatcgacacactgggtatctgttytggcagaagtccctgctccatgtgacrcccgtgtagtgaggtagaggttggggattctgaactaatgaagtccctgtattaggatatgtgctggagtggagacctgtgctgaatgcaaggagagcagagagagaaaaaaatataattgtgattaaaggagtagatgatgttttgacctctttaaaaatatagatttaggcttggtgacaatcataacaggataaatgttggccatcttaagctggtagctttcaatataattgatgcttatgaaaggtacttttgaaaggtagttaatggtgcaaagtagttctgtatatggtgattatgagcactgtggaagtccagacaacagcgatgtccctgcagcaaaaggggctggggaaggcccagtagaaagcacacagcttgcttgacccataagccaagaagagcaggctctaagtgtcatgggagcaaggacacaggggctaaggcacagaggtagaaatgacaggaagggcgtggtgcacgcaggaaatagcgagtacgccagactgaagggtgttaacagttcaggagagtaggactgtgcgttgaacaggtagtttgggatcagcttgtaaaaatcttaagtgtctggcaaagcagctagataataggaaacaaaagttttgaaaaaggtagtaatatgaacaaagtagattttcagaaaattaatttggatacaacatgcagggtagtttggagacaaaaagactagcttagatgctcttggtatgatgtcagtatgcagtgttaaggacttgagttaggatggagactctaggatgaaaaaagatgagtgtgagatacatgcacagaaattgatagaattaagaccctcctaccatatggtccccagcaccaaattctgttcctaatgtgatcccacaagttcattctgttatttgaattgggatattatattccaggcagcttgtgttgacttggtgaccatatctcctggatcaccttacgtttgtggctaattaaaccctaaaatttttacatacaatgtaccaccaaacctcatatcctcttctttgtacttaagtgtttttgttttgttttgtttgtttgtatctagtgtaaaaagcttgttagccaggcacggtggctcacgcctgtaatcccagcactttgggaggccgaggtgggccgatcacaaggtcaggtcaagaccatcctggctaacacgacgaaagcccatctctactaaaaatacaaaaaaaaaaaattagccgggcgttgtggcgggggcctgtagtcccagctactccagaggctgaggcaggagaatggtgtgaacccgggaggtggagcttgcagtgagctgagatcatgccactgcactccagcctgggcgaaaaagcgagactccatctcaaaacaaaaaacaaaaaaacttgttaagaaaaactaatagtccatgcccctcacctccctttttctaccctagggcaaccatttttaactcttagccaatttctttagcattaacttccatatccataaataaaataacattctttacataatagataagtcttgactttctttttttttttttttacctgagacagtcttgttctgttgcccaggcaggagtacagtggtacgatcttggctcactgcaacttctgcctcccaggttcaagcgattcttgtgcctcagcctcccaaggagctgggattacaggcatgtgccacaatgcccagctaatttttgtattttcagtagagacagggtttcactatgttggccaggctggtctcgaactcttgacctgaggtgatctgcccgcctcagcctcccaaagtgctgggattacagacgtgagccactgtgcctggccgactttttagagttaagcattatgtgtgggcttgccattaaagaagacagaaacttagcaacctttcagcctgactggcaaaccgaggcttctgtgataccaccctctctgtttcttcctctgtctctgatcatttctgtcctatcttggctaccttattgtgcttacctctaaaagttgatgttttctgttgtcctgggctcattrtgtttggtattttacatgctttctttggtaacctcatccatttgatgattttagtattgatgtatgctgactcccagcatgaaccattccctgagcttcagactcctgtcagattgtcagttaggcatctgtcctttgactgcctgagaacctcctgaagtatagcataaccaaaactaataccagacttgcttattcacctttcctgtccatgttagttcatggtaccaccgtgcactcagtttccaaaaaatgtgaaatgcattttccgttcctactgccactggtaagaatgctttggcctttattatttcttgtttagattatttcagtcatttccttacgcatctattttgtcctacctacatgaaatgcatctttaacagtgtcacaagagtgatctattgaaagtatcagaaacacacagctggtggccattccctatctactgccattctcacctccatgcttttattcttgctgtttttctgatggtgctttgtttattttatacagtagttttaggtttatagagaaaaaaaatttatacacttcctctagcaccttcacccctaccccagtttccctattattaatatcttgcattgtttggtacatttgttagaattgatgaaccaatattgttgcattattattaaccaaagcctgtacatacattagaatacactctgtgttctacattctgtaggttttgccaatgcataatgtcatgtatccactattactgtgtcatatgaaatagtttcactaccctaaaatctcctatttgtggccgggcgcagtggcttatgcctgtaatcctagcactttgggaggctgaggcaggcagatcagctgaagccaggagtttgagaccagcctggccaacatggtgaaaccctgtctctactaaaaatacaaaaattagccgggcatggtggcgggcgcctgtaatcccagctacttgggaggctgaggcaggagaatagtttgaacccaggaggcagaggttgcgttgagccgagataatgccattgcactccagcctgggtgacagagcgagattctgtctcaaaaaaacaaacaaacaaacaaacaaacaaaaacagctcctatttgtccctttccctctgcatgttctagacgtaacctgacttccactgattgttttattgtctttaataaagtttgctttttccagagtgtcatgtacagtaattggaatcatacagcctttccacttagcaatatgcattgaagtctgccatgtctttttgtgacttggtagctcattctttttttttaattactgaatgataatccattgtacggatgtaccactatttgcttattcattcacctattgaaggacatcttggttgcttccaatttttggcagttttaaacaaagctctgtgaaggttattgtgtccacctacattttcagcttacttgagtaactgtcaacaagtgcaactggtagatcatatagtaagactatgtttcactttgtaaaaaactgcaaactcttccagcatggctgcaccattttgcattcccaccagcagtgagtgagcactctgatgttccacatccttgctaacacttggagatgtcggtgttttggattttatttaattaatttatttattttaagacagggttttgtcctgtcactgaggctagagtgtggtggcatgatcacagctcactgcagcaacctcccaggttcaagctatcctcccacctcagcctcccaagtaactgggacaacaggcatgcaccaccacaccagctaatttttgtgttttttgtagagacagggtttcaccatgttacctaggatggtcttgagctcctaggctcaagggatcctcccagcttggtctcccaaagtgctgtgattataggcgtgagctatggtgcccagccagtgttttggattttagccattctcatagttgaacagtggtatctccttgttgtttagtttgtaattccctaatgacatgatgttgagcatctttccgtatacttatttgccactgtatatcttctttattgagatatctagtcacatcttttgccctgttcttaattgggtgttttcttactaggttttaagagttctttgtatatcttagctggaagtggtttatcaggtaccaattatgcagatattttctcctagtctgtggcttgtcttttcattgtctttctcagagcacaacttttaaatatagacaattaggtccataacccattttgagtttgtatttgagttcgtgtttgtgttcttgaaacaccatggttgttaacttggatacattactgtcatctaagcctcagacctcacttaagtttcaccagccgtttcaataacatcccacagaacctagttcagaatcacctgttgcatttaattgtcatatatctttagtctggacatttcctttgtcttttttggactccgttatcttaacgcttttgaagatttctggcaagttattttgtagcacgtccctcagtgtgggttcatcagctgttttctcatcatgagattcaggttacgcgtctttggcccgtgcctcatagaagcrgcactacgttcttctcgtcatctcccatccagtggtgcgcaggtttggttttcctatcactgatgttcctcattttgatcaaggtgctgtccaccagacttaccctctgtcaagttatttttttccactttgtattaagaagtgttgtatggagaaatactgagaaactaggtggatatcctgtttctcatcacgtacccagttcactcctttatttgtgtgaaggaattaatggtttcctatttggtgggttatcatctgttactatttattttgatgcacaaattattgtggacttgaccagtgggagccttttcaagctgatttctatgtctttttaaaatgtcctcatcattctttgagcagtttctagctttctagcacaataaaatgttccaggcttggccagacatggtggctcacgcctgtaatcccagcactttggaaggacgaggtgggtggatcacctgaggtcaggagtttgagatcagcctggccaacatggcaaaaccctgtctctactaaaaaaaaaaaatacaaaaaattagccaggcatggtggcacatgcctgtaatcccagctacttgggaggctgaggcaggagaattgcttgaacccaggaggtggaggttgcagtgagccaagatcacgccattgcactccagcctgggcaacacagtgagactccgtctcaaaaaggaaaaaaaaggaaaatgttccaggcttatcttagactttctttgctccagccctggaatcagccatttccccaaggagccctggtttcttttagttggagaaggatatttagatactaagacctgggtcctaggtgtgcttactgctgttagggtgttgctgctgccagactctctcagtggaccaagcgaggacatatatatgtatagctgcatacataacatgcacacatacatgtaacacatttccatttgtatttatttatcagtctaccatatgttgaacactctgattggccayaatacctttaattccacccagcccacagagttcattctgcttctctctctttccatgtttatagctacttctctgatagtaagaagcctggcttgctttcacttttgtaaatggccagatttgaccaagtgccctggatgtaaccaatcttgcgtctctgccactgcctcctgtcgtcacctcactgaggctctgtcagacccctctgaggttatttacacccagaccctgaaacatgaagctgctagtttaatagtacctgctgcaaatattgagatccagtgtgttcatgaggcgtttgagtcacaaaggttaggtttatatataatttcatagaattgcttaaagaaatttttttcttacaggctgtttactaagacaatcagagagagaaagactaagaatcactttggctttaacagttaatttgttattttgtacttaatttattgtaaaatggaatataacttcacatatatattacatacggacaatttaaagatgattaatattgaacagagatcactcttgtacccattgcccagcttaagaaatacagcctcggccgggcgcggtggctcacgcctgtaatcccagcactttgggaggccgaggcgggcggatcacgaggtcaggagatcgagaccatcccggctaaaacggtgaaaccccgtctctactaaaaatacaaaaaattagccgggcgtagtggcgggcgcctgtagtcccagctacctgggaggctgaggcaggagaatggcgtgaacccgggaggcggagcttgcagtgagccgagatcccgccactgcactccagcctgggcgacagagcgagactccgtctcaaaaaaaaaaaaaaaaaaaaaaaaaaaggaattacagcctcgtcaatacctttgaagcccctttttgccactctctggttgcattcctctccttccttccgagggataagcactctgtggagttttatattaattatcctataatagcttttttattcatctttcttttatagattgctgtcgtggctgtgatgtgcaaaccccacagatgtccacacatcagttttacaggaaatatatgtgtgtaagtatggtgattttattaaattgtatgtatgttttaattaagctaaatatgccccctctagcccttagtcagtacatcctggtaatgtttaaaacttcagcttaatagatttatagattactcctttcaaacaagcaaccattggtagatattttagtgctttaaaattggaatatataaggccgggcaaagtggcttacgcctataatcccagcattttgggaggctgaggcaggtggatcacctgaggtcaggagttaagacgagcctggccagcactgtgagactccgtctctactaaaaatacaaaaattagccgagcgtggtggcatgcgcttctagtcccagctacttaggaggctgaggcaggagaatcgtttaaacctgggaggtggaggttgcagtgagccgagatcacgccactgcactccagcctgggcaacagagtgagactccatatcaaaataaataaataaaattagaacatatgaatattttaatttattgcaatatacaattctaaaaatgtaggttatggaactcacaacagtasacattgggatatgcaactcaaaacagcacattctgttaaactcataaatgaaacatgggaatatgagctgcctaaattccacgtcagaaatttaaaatgaatttggatcagaaacatatcaaaataaaaaattatccttatacgtaacctttagatttctcaaactcacctatttgaaagaattagcggaagagtttgcatgattctgggtaggaagataaaaggggggaaagattttcttgartgtggttcccaagagaacactgagtattgattcaaacttaggaaaacttcatttctgttatttgcccctaaaagcttaaacctctgaaataaacacaactgcagttattttgaaaatgggtgtaataatgtccctttacatatttatcttatttacttcttggtagaaaatacattatttacagatactgcaaaggtagattcttctgttaggatttgaaaaggaagctcatttgttaycaggattctttggagatggtagatgcttggaactagctgattgaactcagttttgcatctgacattcttgttcttttgttgtactggcagatactgccctggtggacctgattctgattttgagtattccacccagtcttacactggctatgaggtacagtaactttgaggctgtcctgatgaaatgttgcatcatgctttacctgtagtatggttttaccagtactggctttctgacaattttttgtttttgtttttgtttttttctgattttaaaagctgttcattcaccaaatatttgccagtgtctactagtgccctatattattctagccactagagaaatacttacataagcataaataatacttacttcttatcccaaatgctgttctaagtgctttacaactgtaaaccttattgcagtgttttgaagatagacactatcatgatcccagtttgccaatcaggaaactagggcatagcaggcttaaacagctggcccaaagacacactattagtaagtgacaaccaggtttcgaagtctgtgctgcttaccactacattgtactgtcactttagcagtggaaaatggacagggtcccattgtcttctggaatttacatttttttttcttttttttttttttttttgagatggagtctcactctgttacccaggctagagtgcagtggcacgatctccttcactgcaacctccacctcctgggttcaagtgattctcctgcctcagcctcccgagtagctgggactacaggcaagcaccaccacgcccagctaatttttgtatttttagtagagacaaggtttcatcatgttggccagcctggtctcgaactgctgaccttaagtgatccgcctgccttggcttcccaaaatgytgggattacaggcgttagccactgtacccagcctggaatttatattttaataatggaaggtagacagtaaagaaacaagaaaaagtatcaggcactcaaaaaatgctaagcagagatgtaaaatcaagtaaggtgatggcagctgagatggtttagctgtggtcgttaggaagggattctgtgaagtgagattgaagttgagtctgaatgacaagaaggacctagtcctaagaatatgtgaaaggggcattcctagcagagaagtcactagaatgaggcccaaggaaggaaagacatgggggtgttgtgcagtgcagggggtgagggaagcatgaggctgggagtgcaaatgagctggggtttgtaagcaaaggtaaggagtttccattttagcgtaggagtcatgagaagctattaggatttaaggcaggggaatgatacaatccaatttaggttttttgaaagatcattttgatggccatgtagagaaagggttagagtggagaccagaaagaaggcagaaggccagtgaggtgcttttgaaggagtcaccctcctcagaacacctcagaagccaggaaagcttgtgacttttttctcatatctgttttcattttttttcttgttttctagggttcaaattttttaaaatacaagaggaatgatttcgtgaaaaggcttcctctcattcctatcccctagccactctttttcactcttccccctaccagttagtgttgtttgttatttcctccccatccttcagggatattttagggaacacagcatacacaggttgcctatcccttatgtgaaatgcctgggaccagaagtgtttcggattttggatttttctggattttggaatatttgcatatacatagtgagaaatcttgagagtggaacccgaatctgaacatgagattcattttgggtttatgtacacctgatacacctaggctgaattaattttatacaatatttttaataattttgtgcgtgaaacaaagtttgtgttaagtactatgtgtggaattttccagttatggcatcatgttggcactcaaaaaattatgaggtttggagcatttttgatttttggattagggatgctcaacctggacrtattctttatttgactgattccatataaggtagcatatcagagtcctctttcactttgccttttattttacaatatcttagtgaacattttatgtcagtacattgtttcgtggctgtagagtattccactgtatggtggtagccattacaaactgtgtggtattttagaagcttacttaaaagttactttattatatgattctggtatatgtatgcacatctatgtctgtgagcagaacactttggtgaccctgggattccagaagtgtttatacaaaagacagatgtgatccaaggagacaccctgctgttgaggtgtttatgacagcgtgagtggacacctgccagatgcgattcaggacattattttgaaccctgacaagactgagaaaaattaatgcgggtacaagccacgttttcagtgttcggaaccatggagagttttttttaaaatacagtccttttgaaactactttttagttttaattcartgtgggcataacaatatttttctcttctagccaacctccatgagagctatccgtgccagatatgaccctttcctacagacaagacaccgaatagaacaggtacatttttaaaaaacatgtttcttaaaaattaggtgtttatacttagtaagaagccattgttgcttgattcaaattgaacctgaaataagaatgaaaaaggtgtttttcctctttgtaagttttcaatatccatttgagggagggagaatttgccatgcctagcaaggtcaaaaacactactttctttaaagactgtatttattgtttaagggttttatattctctaagtttttttgaatttgtagaaagtcatttgtagtatgaaatttgtggaataaagatgtatgaaagttcttagacaatgggtgggtgtgttgacttttaatttccaaaagtcagattaagaagtattttgactggccatgcgcaatggctcatgcctgtaatcccaaccctttggaaggctgtgacagcaggtcacttgagcctaagagttcgagaccagcctgggcaacatagcaaaaccccatctacaaaaaatacaaaaattagcatggcattgtggtgtgcacctgaagtcttagctacttggaaggctgaggtggaaggatcccttgagcctggaaggtcaaggctgcagtgagctgtgatcataccactgcacttcagcctgggtgacacagcaagaacctgtctcaaaaagaagtattgtgacagatttgttgggtggaaataggaaatttcctacaaaggagtacaaagaactagtcggggtatggcattgttctctatcatggtcatggtggtggttacataactctaaatatctatcagctctcatccattgtacacttaaagttagtggattttatcgtatttaaattatacctcagtatggttgactaaaaacaagtactatgtacatgaccttgcagtgttcaagaaatctgaacattaatacagatttcctttatttacaagtttattttaaacttgtccaatttaaaaaatgtaaagcactgtccatagttgtaatagtaatgtatagtaggcacatccaagtctaaagtagataatggtacataaccatagtggataagttgtctctgggtttgtttattggcttattggtgaatactgttcagttttaatatccactttgctgtcacccaagcgtatgaggaacaggattgtcggtgacaggagaggactccatctgggggagcccacatttttccaaacagtgggttctaaactgacctttgcttcaatttctttttgggctatgatagttaatttatttaaaatgtaaaactattgagcatgaaatgcttatgtttaccaaaaaaaggagcatagtttacaagatttagaaatgaacatagagcagtgattcttttcttaaatgcactagaattacctgagtaacttctccaaaacgtgtcacatcttcacctcgggaggttctgattaagtctgctttaaggtcctagcaagatatttttaaaaactaccagggtaattttgatgagtatctcttgtaaagaaccatagatacagaaatagagtattcttttagtgttgatatatatgtacacacatgcatatatatagtttttctgtatacgttttttgccattttcagaaattagtgttaatttcaatacctatttttaaaaattagaatcttggcttattgtagtcaacaaaatgaaagatttgtatcattctctccactagtagaggagacctaattttattattattattwttttttttttaaacagagtgtcactcttgttgcccaggctggagtgcagtggcacaatcttgggtcactgcaacctccgcctcctggttcaagcgattctcttgcctcagcctccagagtagctgggattacggcgtgtctggctaatttttatatttttagtagagacggggtttcaccatgttggccaggctggtctcgaactcctgacctcaggtgatctgccagcctggtcctcctaagtgctgggattacaggcatcagccaccgcacctggcctgaatatttcatttttaatcagactttcacttttttttagaaagcagacttgaagtgcctcctgtgcctggaatcatccatcaattttagactgctgtcttgatttttctttccaatctattctttttttcttccattacatcaaatccttattatgttacataatcattcatgtatcattgttgaccataaatgccacctttttgtcctctaggcttaccaccaagtctgacataaaatacatgatcaataaatacttactgttttgcaaattgtattatatttgtctttactgctttctagtttatattcttcgtgtttttaaatttccgctttgtaggtattcaagtcaagcctcttatttgttattttatattctcattctccctccttatttgagttgtactcacttttttctttcagacttgggcctattttttatccacagaattagctaagtgtgtttcattacttctgatttttaaactgtactgatgaaaacactgcaaaataagagatttgcaatgccttcttagagtagttccttatgcttatatcattctaatgctgatgaatttgtctttcagttaaaacaacttggtcatagtgtggataaagtggagtttattgtgatgggtggaacgtttatggcccttccagaagaatacagagattattttattcgaaatttacatgatgccttatcaggacatacttccaacaatatttacgaggcagtcaagtaagaaattcttattttatcatagtctccagagtggttgtcagtttatgctcctagcagtagtctacgagaatgccttctgccctgcatccacattcttacttctcataatctttcttgtttcatgggaaaggattatttcagtgaaaataatgctttcgctgaaataatcttttccagtgaaaataatcctttcactgaaataatccttttaaagaaaaaatgaatacagtttgttgacatagtagtattctcaaatagagagattckccaaatatggtccatgaatgtcttttcagccttaggctggtctaaatgacagtagttttgattggcctgattgagtttttcagcccacccaagaagggggctgggagtattttagctgctgtaaaatcagcaaaacaaggtactgttatttaaaaacctaatttatagtaaatatttcataattattaaatagtaactgtttatgattgggatcttagtctgtgttgtgctgctgtaacaaaatatctgagactaggtaatttataatgcacagaaatgtattggctcacagctttggaggttgggaagtccaatgtcaaggtgctggcatctggcaagagccttcttactacgtcatcacacggcaaaagacaagagaaacaaaaagcggaccaattcacccttttataatggcattaatcttacccacaaggtcagatcgcctctcagaggtcccacctgttaatactgttacaatgacaatttcaacatgagttttagaggggacaaactcatgtctgtcaaatcatgtgttattcaaaccacaagttaatttagtcattttgaattctagttgacaaaattatgcatcattttgacaccttgtttttagcaagaagaatactacaggttagtatgtagttcagtgatttaagaagtgaaagtcttaaaatagtttttgttctcaggagttgcaggaacacctggatagttactattttccttatttaacaaatccttcttgagggcccactagatactatgtgctgttttagatactggaaagtggtgatatttaggctgagaccggaagtacaaggaggagttaggccaacagcaagaaagataaaataaaggctctgaaatgggaagcagcctggggtgttctagggacagagaggaagccagcatggttagatcctgtgttaatccatttgtgtccctataaaggaacacctaagactaggtaagttataaagaaaagaggtttaattggttccagttctacaggcttcacatgaagcatagtgctggcatttgcttctggtgaggcctcaggaagcttccaatcatggtggaaggtgaaggggagccagtacatcacatgacgggtgcagggaggtgccacactcttttaaacaacaaatctcacgtgaaacaactgagcgagaactcacttatcaccaaggagatggtggtaagccatttatttatgaggaatccagccccaggacccaaacacctcccaccaggccacacctccaatattggggatcacatttcaacataagatgtggaggggacaaacacccaaaccatgtcagatcccagtgaacaagagaaagaacgtcatgagacggggttgaagtgttaggtaagggccaagatacatgcttttaaggagttgaaattttatttgaaatgcagtagggagcagatgaaggggaagtggcawgttctggttaacaggtagggtcattccggctactgtctggctaatggattagaggagtaccagggtgaaagtgggaaaccagataggaggccatctgattacatccatccctgctcagatgggggcggcagcagtggtgatggagaggagattgagatgggggtaagagaaaagaagggatcaagcctgacactaaggttytggctgtcagaaatggtaggaaggtagggtagggctgtatactgaggtgggaaagatagcgggaagagcagagaaaatctcagagggagaaaatcaagagttctgttttggatgtgtgaagtctgaagagcctgtgatacattcaagtggagatgtcggtgggctctgaatgcaagagaagtctgagctgacggtacgaaactggggattatcagctcataggtaacattgacaaccatgtaagtggaggagaccacctcatgggagagttgtggatctccaaggtatactaagtgaaaagcaatttttagagcaattcttatagtacgatcccattatttgtgtgttcatgcacatacacacacacatatctgtatataaatgcatagaaaaggtggcagaataatggtcatcatagaccttagagctgaggaggaaaggacatgggaaatggcagcaaaggaggatatttacatttgctctgtatacagtgggccaggtgttgtcatgggtgtttaatattcacttatttagtactcatagttagcctttgagttaagtgttcagattatctctgttttatgggtgaggaagctgaggcacagagagataagcaatttgcccaaagttgcagaggtggttggtggtagartgggatataaatcccaggtagctttgctttcagagcctaactttgcaagctgtgctaggtgtcagaatgtgagtgtgtctgtatgtatgtgcacatgtgtgtgcacatcatcagagcttgaagatcttggaaggaatatggcctgtttttccttgccctccttccctaccaccctcaggcttttctctggcttctcttttatatggggtgagggtttcatatagctaattataaggttgttcaaatagtgccacctcttaagattttttgtgtaggacaaaattttggatagacctaagagtggtttttattaccctstaagtaaagcagttcttggcacatagtaagcacaagtaaatgcgtgaatgaattttgaatgaacagttagctaatgacctgggtagggttgcctcttggaattgggggcagccacatctttttgtgccctcgctactccccctacccscttaacttcctttgttctccttgggtttgtaaaagtgaaaagaagagaggagctttttcataaaatttaataccaagggtagctcaaagagcccatstgaaaggtttggcagctgggagagtttgtgtggacagcagcccacttctgtttgattgactctagggaatgcaacaggtgaattctgtgtccgtgaatctggacctgyagcattgtgatttcttcgtcttacaggggctttmgtaatagaggagatggcgactgcattgttactgctcgttcaaaactgatcaagaggccgggcgtagtggctcacgcctgtaatcccagccctttgggaggccaaggcgggcagatagcttgaggccakgagtttgagaccagcctgaccaacatggtgaaacttcttctctactaaaaatgtaaaaattagctgggcatggaggctggtgcctctagtcccagctacttgggaggccgaggcacagaaacacttgaacccaggaggcagaggttgcagtgagccaagattgcactactgcactccagcctgggcgacagagtgagactgtgtctcaaaaaacaaacaacaacaaaaaaaactgatcattaatatgagtcatacttagtaaatgctgaagtcttcaaactttagaggagtaatgatatcatccagctaattactcttaataatactgaaaaatcaaactataccttagataaaatgtgattgaggaaaaacaacctttattagttcaaagccaggcgacggggatggcagcagaaggttctctcagagggttgctgaccacagttcattcagctctgaaaattccctggcagggacatctatgaagataagtttttctctgcaagcttatatacttctgtactcatttcttggaccttaatatgtaaggtcttcttatcttgaagaccttacatattaagtggaattgagctgtaaatatcttagacttgcctctctcccccataaaaatttgccactaagcttttcatctcctacagtttgggtcccctgaggtatatgaagcaggccaactaagatctgcatagtgaacttttagtatgtatctagtttgacattttcatcaattgaaagtaaaaattttgttttattcttggtgtaacattttatttttgcagaaatgttctagtgctaatggtgcttgaatgtaagttttccatcattgggttgaaaatagggttgtctagtccagcgagctcagtgcagatcatgatgtgtttgtagaaaaagccctgtggaagagaaatcctctttcagtaatattctaggcagtgccagtgttgttttgtttctgttcttgaatttacctcaagagggcaacgaacactttattttcagataaaaatttatatatgatttgggtcttcattgcaacacatctcatgaatgcctcttgagaagtaatgaaagtacaatctgggagccataaaaccatccataaattacactgaattctgccaacacacactttaaatgttttgctcttttctctcagtctctatatttttatgagatcatctggaaaaaaaaaagacctgatttgtggcgtgttgttgctttgttaaggtaaagttttactacaaacccctcataatagagtttgtatttgttttgagggaaactttgtatttgaggaaataatagtctagtttgtgctatagaactagagacagaaagtattttcaagtgttggcataattgtgaaataaaaagcagcccagagaagttgtggttttgacataatgtggccctcggaaatgtttggatttgaccttgcccttctctctcatcctgcccagagtctatgagtgaaaactggttggtttgcacagcgtagcccactgctcttagatgtaaggtgatgaacttcatgtttattttacttttgtttttgcttgctgactacatagatgtaaactgactttcattagcttagcagggttttttaaagattaattttaaattaggttaaaaatgatgtattgtgacctatgagtcagcaagcagcatttaaggttaatagtctgttcacgttagggtcaagttttactgctgtgttggctcaggtgtccctgctatgttttcatatgttgaacctgattaaagttttgcttcttaaaagaataggagttaaggtaaagaaaagccccagcaagcagagcctggttattatttatggcaagctagtagcaagcagtgtgttatatatattctcgtggatggataaattggaaagttgagtgaacagagagttcaaggacaaaacaggtatggcttttgtgaaggctcattaaatcragcaaagtgctaatcactcagtactatcagctggactgagattcttcagtagtctccagagagcaacaattactggtgactgtcatcgtgtaacaatcaggctctggagatgaaaaagaccggtagtgggatctgagtcacccattcactagaatgcaaatgttgccaaataactccaacaaccttttaaaatagttttattcctttttaatcagctttgcccagaagcagttttacattcaatctttaatgctccttggctgttttcacaagatgcaatttaaagggtagttacccattaaaaagtgagtgagtcatactttctccctgtggaattttaaattcatttcccgttccttcctcttcccccgccccgccccccacgccccattaatgactttagatcctccaactatgttcttacctgtctgagaaaagctgaagtgctaggtaatgctaggtaccaggcccagaagacaatttcgtagacttgcacagctgcaacggaagcaaaaggaacctacagagacctgagagtgagtgactgtggccctgctgccctgggcgtcatttctggcaggcctcaggaccttctgcatttctgggctttgacgctgacactgcttatctctcactttttctattgaccattttactttctcttttggtcacccagatttccatacatggtgaccaggatccttaacattggccagagaacataggatacaatcttagtcactttaagagagttgatatggtttttctttcagcattttatttgaaacaaaaattaaacagtttttagtgagcatccacatacccatcacctagattctacgatacttgctttatcacatatctgtcagttccactatccattcatcagtgtctctcgcgtgtgcttgcgctgtcttttttgatgaatttcatagtaagttgtatgcttcagtacacttctcccgggatacttcatcatgcatatcactgactagtgttcactgtctgcagtgtttttcttttgaagtaaatttacatacagtacaaaacaacttgtggcgttttatatatatatatatatatatatatatatatatatatatatatatatatatatatatgaacacatatattaagtataccatttgattatttttgacaaatgcatatacctgtgctacaaagtcctattaagatacagaatgtcaccgtcatcccagaaagttcccacatcccacttgccagtaaatcctcccctgcgcctcccagaggcagccgttcttctgatttttttccccatcacaaattagttttgtctcttctagaacttcatataaatggaaccatatagcatacacttgtaggcctctctcactgagcatagtattttgagatttatccatgtgttgggtgattcattagttgttacctatttagtgctgagtagtattccattgtatgcagagatcacagtttgtttaccatccttctattgatagacgcctgagctgttttgtttgtggccattatgaataaaacttcagcgtacgttcttgtrtaagtctttttgtggctatatgtatttatttctcttgggggaataaatagacatagaattgctatgtaagtttagttttacaagaaaccgccagtcattttcccaaaatggctctactatttgtactcccaccaataatgtatgaacatttggttgtaccacatcttcaccaacatatggtgtagtcactctttttaattttagccattctagtgggcgtataatggtatctcgtggttttagtttgcttttgcctgatgactaatgatgttgaacacttttttagtatgtgcttatgctatttgagtatatttcctttgtgaagtatctattaaaatcttttgcccatttttgattaggtggttgtatatcctagctgccagtcctttgtcagctctatattttgcaaacatgaaaacccagtctgtagtttggctgtttgttatgttaatgatatcgtttagccaaagtttttaattttgataaagtagaatttagcagttgttttctttcatggttattgcttttctgtattgtctctaataaaccattgcacgttcccaaggcacaaagatattctcctgtgttttcttctaattacaggtttgagctttcacttacaggtttatgttccatcttgaattaattcttatgtgtaatatgaggtggggatcaaggttcctttttccccatatagacagctagttgctttaacatcacttctttaaagattttccttccctattcggattatatcacacctttgttaaaaatcgaaggactcagtaaatgtgggctgggctcttttctgtttcatcgatctgtttttcaatccttatgccagtgctacactgttttgattactgtggctttttagtgtatcttgaagtcaagtaatatgagtcttctaactttgtaattgtttttcaaaattgctttagaaattctaggtcctttgcatttctatgtaaaatttagaatcagctggccaatgctctattaaaaagtataatggatttagaattgtgttaaaactatagaacaaatggaaagaattgacaatttattgcttcttgcaattcatgaacatagtctatctccttgtatacttaggtttttaaattctcttagcaatcttcattgttgagattgtataagccttttgtaaacaaattctttcaaaatatttgtatgtgttttggtgctacagtaaatgaaatgtaaatttcatttttaaattttattattattattwttttttttttttttttgaatcggagtcttgctctgtcgcccaggctggaatgcagtgacgtgatctcagctcactgcaacctgtaccttctgggctcaagacattctcctgcctcagyctcccgagtagctgggattacaggcatccaccaccatgcctggctaatttttgtatttttagtagagatggggtttcaccatgttggccaggctggtctcaaactcccggcctcaggtgatccgcccacttcggcctcccaaagtgctgggattacaggygtgagccaccacgcccggccataaatttcattttttcaaatttttgctgctaatatatatacatacggttgatttttatatattaatgttatgtcataagaccttactaaattcactacttaattctaaaagctatttttgtaaatcctttaatatttacttcctaaacaatcatgtcatctgcaagtacagtgcattttacttttcccttttggatttgtatgcttttctttctcttgccttactgcactgcctaggaccttttcttacagtgttaaacagaagtggtaagagtgggcgtctctgtcttgttcccagtgatacagggaaaacatttttatttcagtattaagtccagtgttgcctgtgggttttttatagttacatgtattagattgaataagtttattgaaagggtttatcattaactcatttgtctgatgctttctctgcatctatttaaatggtcatatgattttcctcctttatttggtaatatggatcattttgatttttttttaacattaaacctcacatgcctaggataaaccctattatatcatcatctttacatattgttggattcaacttgctaatactttgtagaggatttttgtgtctgtgttcatacagggtggtggtctgtaattttcttttttataattttgttgtcaggtattcgttgttggtattagtgtaacgcaggcttcacaaaacaagtaaggatgtgttgttccctcccctgttttctgaaagtgttcatgtaacatgaatatgatttcttccataaacgtttgctagaactcaccagtgaaactatctagggctggaattttctttatgggagggttttagatcataattcagttcatttaatagatatagagctattcatattttctgtttcatctgtgtccattttaaaaagttacgtttttcaaggaatttgtctgtttcattcattttgtcaaacattttggtattatgttgccttattaggcttttaacatctgtggaatcttagtgatcacccctgtttcaaccctgatactcatcatctgtgttttctctttttttcttgtttacccgagttaggggtttatcaattttgttgttcttttcaaagaagtagcttttggttttatttcctctactctgtagacttctgcttttatttttattctactttctttccgtttaattgctcttctttttctagtgatttaataaggtataaaagcttggccaggcgcaatggctcacgcctgtaatcccagcactttgggaggtgaggtgggcggatcacctgaggtcaggagttcgagaccagcctggccaacatggcaaaaccccgtctctactaaaaatacaaaagttagccatgtgtggtggcacgcacctgtaatcccagctactggggaagctgaggcaggagaatcgcttgaacctgggaggcagaggttgcagtgagccaagatcacgccactgccctccaggctggataacagagtgagactccttctcaaaaaaagagaaraaaagcttggccatcattttagacattttcctcaaagcactgctttagctgaatcccacacattttgatatgktgtattttaattattattcaattcaaaatatttyttcataccctttatatmtatgtatttgatccatggaatgtataggaatggggtgtttaatttccaaatttccagacaatgaggtttttcttgatatcttattaatttctaatttattttcattttggccagagaacctactctgtataattttggtgttttaaaatttattgagacttgttttgtggcccagcatatgtggtctctcttggtgaacatgccatgtgtgtttgtaaagaatgtgtgttctcagttgctgggtgtcatgttctataaatatcagttaaaccaagatggttggtagtagtgttcaggtaaattttgttttttattcttttgtagttctatcaattgctaagagattgaaatctccaagtatgattgaggaactctgtacatctctcttcatttatattgatttttactgaatgtattttgtaaatctgttattaggtacatacacatctatgattgctgtgttttcctgatgtatgagcttttcaccattgtgaaattacctctttatcatcatgagatgtccttccgcatccctggtcttgcagtttacttggtgttaatttagccgtcacagcctcatgtgcttactgtttgccctgtgtattatccttttccatacatttgctttccacccatgtttctttatcttgaaaatgcatttctttagacagaagtctacagtaattggctctttttttttttatccattttgctcgtgtgtgccttttaattggagtgtttagtctgttaacatttgatgtaattattgatacatcagtttaagctgatggtttgatttatatctgccagtttaatcatctcctcactttggttttcagtagccaagaataatagttgtaatgaatactattatggtctaattctttataatgtattttttctatatcctttaatagggaatatcttcttaagagaaaggtagaggactccttatatctagtacaatgccttaagcatagaattctggtacttaataaatgctaagtgaatgcggtggaaagaactgtcccttaagaatcaggagacatagtctccagacttatttatattattattttgcattattacctggtttaatccacttattttgtgtgtgtgatttagtttcctcatctataaaaatgaggaggtttaggactatattatctctaaaattatacctttctgtcatctatgatttgaagctttctaatgaagagaatttttatctaaaagatatgttcacaagttattcttcatttagcaaccactttctgacaatcattttctataatgtttttatgtatataacccttaaatttcaatgtggatataatattaaaagaatgcaatatctgtgattctttttttcttttctattartaatgtgttgctgctggttctttagctacacgaggggactacaaaatgatagtttttgtcagccatgaaaaaaatcaaacctcaaacaaaatgttataagctgtttttatatatcttaagccctgccagctaatgtgatagggcacaagggtctttgattagtttgtaagctgcagtgccaccaggttggtttttcataggtagtactcatttttaaatcaaaattctgtcgttacttcattttgtgttgggcgtggttaatttatagaacctcatgatataaccaccaatatcgaggaagcagacttgactaccatctcaaaaaaagattgggggtaatagttatttttaaatcctcaagcacatcaaacatccaactcagttaagtctagagcatcactagcagagcattgggcagaacttcaaattttattgaggtattttcaagatagggtaatagttaagaagaggaatttgttcatggtgctgctgccaaggagttacaccaataactcaaggtgttatcaacaattcaaacaaatctggctgttcaaagaagtgagtaaactccactgacttgttttgggaccgtagatggagaagagattgtatgttgtgactaacgaaaatgaatatttcatctctgtaccattttttactgtgcaatttggtttgaacaggttgagtatgaggttgcagcatgtccacacagggaatrttctgtaagccattcagcaacttgagccttgagttcttgtgagagtttaagcaggactagactcaggcacatccagttgcagtraggacagaggttttgaaagaggagctgccacgaattatttgtaatgagaggtgcccacctctttgataccacagcttcttggagtgaaacaaaagatagtttccagaagataataaagagactttaaaatcagtgtgctatcttccttccatcagtgtccccctggttgggcccttagtgcaaggagacagtaataatagatagtgcttctgtcaaaaggtcgctttcttctttccagaaatagaaacatgcttcccaagaaataatctaaatctatttatatttctgccacttctagctttttgttctgtagtcatttctctttttttttttttttttttttctgtatgtcttatccccccagctagattgttaagcatgtctgggacaggaactattatatttttactttctgaagaatacctggcctactgctaggcaccttctaaggttaactttttgcaagaggaaagataagcggtagatgtatctggaggctgctgttggagtgaagagagacctcctatgttcccagttatgcctaattcatttattccttcttcaaatttgtaatttttttttaatcaacggagaatttttagtgttgaagccttttagcctctagacatgtttgagcctgctggctttcaggggcttcctgtccagatggagagacagacataaccacaaataacaaggctgactacttgtagtgtgggcagggtgcttgggaatgggagcactgagatctcactgagggtggaggggttctgggaagatgtcattaggggagaaatgtattggagctctgttttgaaggctggtagcctttggtttttgtttgcttttaaattcctgggttattgtcccatttctcttcacccctgctccacaatttttaaaaattctgtcaacgtaaggttttgacttaagctatgcttcacagagaacatagcatcttttatagctggtgccactcctatggcatacagaaaagcgtaggattcaacataaccccacagtgttgagctgtacaggcttaaaatgaacctgtaataccacaaaaagagcagtggaattggaatcagaggatcccttttgagtcttggccttgtctctcgagaagttgacagagttgctgcatgccgaagaacttgtagcccccaaagaggtatgggagttgaactaggtactgaaggagagccatgcttttggatggctgtctaagtggcacatactgttggatagctacctaaatgatacagggggatcatattaataccaggccataaagtgtcagcacagattggttgaaagcctgtatgcgcatatttgcatattaaagaacagttatgttgatatatttacatctctgttaaatgaagaatcagatttggtgagatgtaggattagatatagtatcaaaaaattttcatgagaatacagtaagcctatgggaaaaattcattgttttgtcattcaaatttgatacaaatttctgtttaattgcttttcagatgnaaatacaattctggaaagaggaaatatagtgaaagcctttttataaatataaaatattttttcaaaacttgagttgtttttttcttccaccatttctgttgctgcaaaaggtaatgacatttcccgcctgaggaaaaacatttttgaaatggagttaaattattatttgagaataaggtttccttctgtggcctgtactatattctgatgacttataaagagaccttgtgcagcagtgtcctctgtatgtccttggtggggcctttgacactctgcaataggaagactagctaataaattttctctttcctctacacaaattcccatttgtgcaattgcctcccctctagtttttcccagtgatgtaagctactattatgccaccacgcttgctaacttaatggtatcacttttaagaaatactgcaggttttttaaaaataccagttggartgcctcattctaggatattctcatttacttttaaaaacgtcatttagagctttttgctttctggggttttttggtacttttttttcaacctttgtatggtgtgctttctccataatatatgaatatttatttttatttgaaaaatgttttccctcaaacccaataattgatgctggaggaaggtgtgttacgtctctcctgtggcatcatgtactgttactgcgtgccttagtacccacctgtttaagnggcacaggacctgatgattctattgtttcagagaagccaaattagtttggatcctgtcttaggcaagatttgataagatctgagccctttttctgtctcatagttcatcttttagtgactttgaactagttgtttacctttagtcctgttgcctgtggtaatcctacctaaaacctcgcggaatacagaaataaacaatgcaaaagagttcaaatgtccagaatgaaagatttgagaatttgttctctagattggtgattcttagctttcttaattattattggcaataaataagtccgtttttattgacaattaagagcgaaagagtgaacctcatggaattagttacaaaaattacagaaattttatgatttttacttttcagtaaagaacaatgaacttcttcagaaagaaggaaaataaatgggaaattttttttaaaggcttctctcatcctccccccaaaattgagaacattgtagaagggtgcactaagaagaatgatggggttctaagaattgagagatgttggccgggcgcagtggctcatgcccgtaatcccagcactttggggggctgaagcaggtggatcatttgaggtcaggagttcgagaccagcctggccaacaaagtgaaaccccgtctctactaaaaatacaaaaaaattagctgggtgtggtggcacgcrcctgtaatcctagctactcgggaggctgaagcacaagaaatgcttgaacccaggaggtagaggttgcagtgagccaagatcgcgccactgtactacagcctgggcaacacagtgaaactccgaatcaaaaaaaaaattgagagatgttgaaaagcagagaagtctggggtgggtccacgctgagttgtctaagcagtgtggtaactggaatacagagcaaggactttgaagtcaggtggacccaacttcagatcctgactccgattttattagctctgtgcccttgaacatgctgtttactccctttcagcttcagtttcatcacttgtgaaatggaggtaataggacacacttcatagagctagtgggaggattcagtactagagtgtgtggcacagagcttggcccacaacagcctctgtaaatgtgagctcctgtcgcctcacttcactagccctgctagcaagagacttacttctctgcctctttggccagcattaaggccactaactgagacagcatgaatctaaagtggtgctcgctactctgatacatgattttagtaaaagacaaaaatgattggtaattttgtaaatcattgctaagattaatagactaggtgaaaaggcttttgtgtatatagaagacatttcatctaaaatattcctataatcattacatatgccctccccccttttttttctttcatttaaaatatagagtgggaaataaataatgtagatggttttcacttatgtgaaaaatggttgctaggaattgaaaaataggttttcacagttgaaatcactgctttcaaggagattatggttgcagcttactgcaggagaataataatgataatgatgataataacattactatgctagctcagtcacgtcaatcttatgaggtgtagatagtgtattatcctcattttgcagttaaaggaaccgaagcacagaggttaatagcatccccatgtgcatagttaggaagtagcagagccaggatttgaactcaggcagcctggctccagagcctacactctttaccactatctcatactaggaggacagagagaaggcagttttttgagacagagtaatgtcttaaaacctgcaacaggttaattattttagatttgctctacaggtattctgagagaagcctcacaaagtgtattggaattactattgaaaccagaccagattactgcatgaagcgacatttaagtgacatgttgacctatggctgcacaaggctggagattggggtgcagagtgtttatgaagatgtggctagagacaccaacaggtaagatggtggcaggtgatcttgcacaagtcttcctccaagttcaccattttctctacattcatacccagcctttcttccttctgaccactcttagggaaagaagtatgggtattcctccttttcagagttctttcttctgtctgtgttcttaattccatcccctctttccctcattttcagtctttctctagtgggtcttttccagcagcctgtaaacacactcatctctctccctcttcttgtcctaagcagccttgtccatatagagagcaggggagaggactcggggttagtagtttaaagcaggagagaaggccaagaacaaagaaaagagtttgaataaaaaggacatcagggtaatgtttaagagattcatttttgtggagcaaataccaactagcaaaaagtttggtgatgccatggttgtaaactttgagaaatttgggagtgcaagaaaagaaggaagtaagagttgttagagctttattatgttccctctagaagtatatcttttagttgaaaagaaaatacccgcgaaaggttaactgtataaggaacttcacagttaattgctaaattagtggagtaggggagacaattgagagtttattaggcagctgagatgattgaccgagaattctaacggtgggctttggaggaaggatgtgttgagttggatgttaaaggccyctttattctgtaggatttgggtaggtgtgattggtgttgtgccaggagaaggaagcaaaggggaactagggaaacaagcactgatcagcatcttagaaacaaccaagaggaatgccaggccgaggaggatggaattttcccttaaggaatagagatctgttgaatattttttagcatggggaagaatctcatggatatcatgtttaattaagaaagagtaaccgaataggatgctcttatgtgggaaaaggcttcaaccagggaaactgtggagtgctgtagccttcaagggctgtgctagagagacagttgtgcagatggaggggaagggggagctttctgaagaatacgacatctgagttgggacttcatggaagagtctgagttggtcaggtgcagaagaggaagattgaggcagaaagaaaataatgaactcctagagatgggagtgccatagcacatttgaggaatttggagtggcttagtttgattagaatgtgaaataggagagtgataagaggtgaggctgaaaagcaggcagaggggctgattattaggggcctgaggagtcagcccagggaggctggacatgaatctaatggagcaagccaccagcacgcataaagctacaatgtgatggagcatatctgcagcttagaaagatcgcttacagtgtaaggggcagtcagagaagagcaagttggaagggagatcaggtacgaggctgttacagaaattaagcaggaaatactgatgtcctggaaagaagtgaatggtggtgattggtgactgattggaagtgaggataagagagaatgggaagtcaaggaggcttggagagaatgtgggtttcatttggctacactaagtttcagatacctgtagaatagccaagtgaaggtttgctttagagcagggctaggcaatagacagttcagcagtgatcaaaatgttctgtgcctgcaactgagttttccattttaattcttctaaatataaattttaataaccacatgtgcctagtggctgtcattttaaatagtgctgctttaaagtattggttatttgggtttggaattcatgagagaggcctggccttgtcctaggaattgggaagtcatcagcaaaaagacattagaaattgaagccatggaaatggttgggagcattctgagagagtgagatggagtctgtggtttctaggatccttctgccgtgaatgggaacaccttcgtggcagaaggatagccacaagacttcagtttagttgcccaaaactattgttaggacttgtttcctgctggattggctctagaatgccaagttaagatgatttatccacgtgaccccaaatgactctgccttctcactaagtcattctctctttctactgttatttaaggatcctccaaacccaccagtgaaatctattttgtatcataggtttcactcttcctccctgtctacaaataatttcacaagatctttaaaggaaagaacatagcagcttgctgcttctgcatggttttgagctcattttaatttttaatacaggtatttacattcataagcttattttgactggtgatgctaaaccaaataattttaatacacattaacttttgccatcccaatgctttactttcaagactttaagtagatgtgtaagagaatttctgagaaatatctcagaaataaagttatttacttccaggcctcctgagaggtggggatgtaaaaaatgactttctgagatgtcttttcccccagccatatgattttggttatggaacttctgttacctgtctcagagattgttttccccttgttccttgtgttaactttgtcacccatttatttgtgtaayagatgttacacaaataggtagtgattttcacaggtagtgattttctttccttaggggccacactgtgaaggcagtgtgtgagtcatttcacctggccaaagattccggttttaaagtggtggcccatatgatgcctgacctgccaaacgtgggactagaaagagacattgaacagttcacagtaagtgtgacttcagccaggcgcattcagaatggctctgcatgtttcttatcccatctggtcttgttgcttgttcactgttgatgttttccagtgttaaagaaatgcatccttattatagaatattagaaacacagtagggtaagagacatcacccatagccccatcagacaaaactcttaacattttaatgaattctttccaagatttttctatgcataggttttttggggggtgaggttgtttatgcaaatataacacagacatacaaatatatatgacataggaaattattgtaatagttttttcacttaacattttaacaagcatttatccatgttgtagcctggtctctgttaacatgttaacatatttaaatgtctttttaatttaatatgtcataccttgcttaaacccttgcaagtttttcagaatttaagatatactggttttttaatattatttaaaaaacactgcaggtaaatgactttatgtgtataattttttttagtatttaggtttatctgtttatgataaattccatggagtagaattatcaggtaaaggtagaaacattttaagaatctcactgtattaataagttgctttgcagagagttataacaatttatactcatttcagcagagtttttcttcccaaataattctctcctgtttattttctatatatgcttatagatgcatatgcacatatgtacatatattttactgtttgctagtttgatcaataaaagtgccattttaacttgcattttgaaattgtaataatacatttttcaagtttgtatttactaattacatttctttcatctttttggaattgtgtgtttttatcctctgactcattattctattgagataagaatatttttagtattagtttatatgaattttttaggtaaggagattatggactcattggtttttatatttgttttaaatattttccttaacctattgttgaccttttacttgtgcttccattaagtcgatcttttttttccttttttttttttttcttcaaatgcytctaagcttagaactgcctttctgttctttgaattttaactctgggttgttttattgttgttattttaactctcacagtttcttgatccatgttaactttgttgtgggaaatgagattggtcaggccttttgtttttcttcagattctccgatagggcaagtgtgttttaagatgatgacgatatttatcaagttatttcatctataaaagtacttttaatttgctctgtttagaaaaatgcagtttaccatgtcttatttgtgaagttaataattctttcctctcaagaagtttacttttattattttttaagctggtgaactgcacctgaggacctgtttatgagataacattaattcacagatatccctcttcgtaattcccccacaatggatatgtaatagactgtgagtctagtatcctcccctcagtaactaatagccaggtgctcagacaccaggccaaaaaggcacctgaaacacactttttattatcatgattattattattattattatactttaagttctagggtatgtgtgcacaacgtgcaggtttgttacataggtatacatgtgccacgttggttggctgcacccatgaacttgtcatttacattaggtatttctcctaatgctgtccctccgcctgccccccaccccacgacaggccccggggtatgatgttccccaccctgtgtcccagtgtgaaacacactkttctttagcacagctcctagggagaccagtaggatagccagaactcataaagtttaagtgctcctgaaaaatatagtatgtttcatactgtaggaagccatagcaaatagctgagtctcagtacatattttccttggtgtcttcaacataaggaatagttcagtaataacattgcaaggacaacctttcttgtaaacagatttatttgcttgtttgtagtctttgcagggaaactcacagggaatatgagtggatcatatttcttttctaactgcatcctagtaaagagtaacagaagggagctaaaatgaaaaatctgagttctttctagagaagaattctctacaaattaaattgttttaaaataaataagttttagaaattgataagaggcaaacagctcagtaggaaaatgggcaaaaaacttgaacaagcatttcacaaaagagaatattcaaatagccaataaacctatcaaaaagttctcaaagtaattaatcttcaaaaaagcgaaatttaaaactacatttggtctcagttttctacagsaccttggtcttgtattgtggatataatttatcttttcttatctctctgaagaaatttattacagattttttttatacattttatttttctgtatgcattgcctctgtttcctccaagtgccttttgttttctttttgttttggttggccccttaatgtacttggctttccccaagtttatgatgatcttcaaccagtttcttatgcctttttttttttttccttgagacggagtctcgcactgtcattcaggctggagtgcaatggcacgatcttggctcactgcaacctctgcctcccgggttcaagcaattctcctgcctcagccttctgagtagctgggattacaggtgcccaccaccacacctggctaattttttgtatttttagtagagacggggtttcaccatgttgaccaggctggtctcgaacttctgacctcgtgatccgcccgcctctgcctcccaaagtgctgggattacaggcgtgagccactgcgcctggcctaaagcgattccttatgcttttaagagtaggggtttgaaaagccggatggcaaggcctgtgtgcctagcttgcaggcgtgcttcactgaagaatgttcttttagcaataagcgcttctttctttatgggattcctaaatgtcagtatcgtgaactcttacgtagagccatttgattcatccagagatgaactctccaacttcctgctttgggctgagtggcctgagtatatctcaggaagttggttgctgacatccagagagtagggcggagagtccaccagtctatgtgctggcttttccctgttttcagccttggtcttcatctagaccttcctttgtacctggaatctcagagcgcagaggctttccagtttctccagggactaaatgttctcatctgcctgttcgggaaaggctaagggttaacggataattccctctatgtacacacttgatccagtacccctgtttttatttccatgtctctcctccatcctgcccagttcttggtacctctgatccgtgagcctttctggaactctgcagtgtgattgagcaggcctttcgttactgtctccttttgctattttctttacttgcaaagtcattcacaagccttcctagtttctgtctttgaagaatttgttgccatcttgggtctcattcttgcctcctttcttgttctctttgttcttctgggtttatactttttaaaaaattctttcctgttccttttttttttttttttcttgagatggagtctcgctctgtcacccaggctggagtgcagtggcacgatcttggctcactgcaacctccgcctcctgggttcaagcaattctcgtgcctcagcctcctcaatagctgggattacagacgcgcaccaccacgtccagctaatttttgtatttttagtagagatggggtttcaccatgttagccaggctggtcttgaactcctgacctcaggtgatccacctgccttggcctcccaacgtgctgggattacaggtgtgagccactgcgcctggcccctgttactttagtgtggttttggagggaaagaaaataaacacttttttaaattctctagtgtaactgaaaattgagaaccaatcaattttcattctttccaaaggaatgtatcagcctgtatgtctccgaaacttattatacaagcaccagaaatacttttctaaatcccatgttcaaatgtagattcagactgggtgaacaatggcttccatacgtgctctttgtgggatggctgcagaatatttattaaagacctgatgattctttaaaatataaaygttayaggaaaatcacacaattacagaagaagatctctgaaactaaatagtacataaagaatacagcatttaagaacgtgacagatgtcaatgagagatggaaaagtctattgttatatttctttgtaaagcaagttaaacaatgaagagctttggaagactaatgtggcaaagataaaaagkatttttccagtttacaagatagagccctgccagctgagtagatactcccaccaaggtgggagtgagaggggactgtgagtccactttcatttctccaaaatatattatgcaaaacaagattagagcaaattatcagtgcaaagtcatggaaaggagaatgcctggtgtctcattgctacatcccaaaataaagaaagaaagcagccagctggggtgatgtagtataagaaatgacttgccaaaagtagttgagttagatstattgctcagtgtccagataacaaatggacaaggtgtagcccaggataggaatggtgccagttggtttagggacagagtagtcatatccagggatcagcaaacttttcctctaaagggccctatagtaaacattttaaattttgtaagctagatgatctctgtcacaacttttgaaatgtaagcaattaagtatattccattattaaagaaaggtatactctagaggtgaaggcagacattgaatagattgtcatgtgatgataagaaagaggtaatactgggttcagtgggattttttttaagtgggacagctagtatttgaaagtcagaggggcctctctgaagaagtggcattcaaactgaaacctgaagattagctagataaagaaaaattgatgaactttccaggcaaaggaaattgcctttgcaggagtggaaaggccagatggtgaggggtggcatgagatgagattgtgcaggagacaagctggaatggtgagggcctagtgcagtccagcacacacttgctttgccccagtgagactacagaaacaaggagtttctgttctgtctgtacgccctacctggtcagaagcaaaggctgccccagggcctactgggtgtgccagagaagctgtcaggggttgagatttcaccctcggtgatctctgcataactaatggagaagtcattttctgttctctattcacaggagttttttgagaaccctgcttttcgtcccgatgggctgaaactctatcctaccctggtgattcgtgggaccgggctttatgagctttggaaatcaggaagatataagagttactctcctagtgacctggttgaattggtggctcggatcctagccctcgtgcctccatggactcgagtgtaccgagtacagaggtagtgtgttatcttttattcctaaaatagttggtgactagtctgtttactatttctcatggaaatagtctgatttcatattgagggttttggatttttcttaatggaaataagataactggaatgctatctgtaaatagggagggatggaaatcatagcatgtctaagccactttgccaataacrtatttatttatctacccattcattcatgagcctggagacagagccatgacggtcaataggcatggtgcttgcttccgagcagcttatggtctagttcagtgtttcctcttccaggtctgcttccatckagatgcagtaatgggtatgagcataagaagtgtggccgtgtgtgcaatctctgttctagagcctctgaaagaaaaagtagcaacaatcactctttacagatattaatgtaaatgtggaggaaaggtgacatatttctgatggcttgaagaaaacaaaataatctgaactgctttcttcctagaaaagagaaagtaagatctcatttacaatcaggaaccttatctacctatttatacttacatacatacatacatatatactggaaacataacatcacagaaaaattttagaagccataaagttacccgtatacctacaatcctaacaaagccaattcccacacacacattcccaccaccctgccaaaaactacccaggttccaatattacaaatgcaaggccagaaggagactgcaaatgcattacaatcagctgctagagcaggactccactgagcacagaaactgtgtgactgatcatgtaaagcaatgaacactgaaaacaagcygaattaactacttaaggagaattatgaaggatataaagtaactgacttgcttgaaggtcaaaggacatttacatgatacttctgctgcatactgatttctcagttttaaaatcattggccaaactgcaggatctraattgcctatatggtctctatttttaaaaatacacctaagaatactaaggagattttaatagaaaaatcaactsttgaaattgcttgtgtggcccttccccttgttgttcaacccttctgaagcaattcagtccaaaggacattaggtggtgyrgagcagtgtaggtatccacatgcaggaggcagggagccacagggtccagagcagggtgagaaggtcactcattcacatgcaggaggcagaggcgtggtgcaggctgatgaagtcagaatgtggcgaaaagggcattcattcccaccaagggcagatctggtacaggatgtcagagctgtacgtcctctaggggtgggttgggggtatatgcagaagaggagacagcaagaaaagaccagttacttacagggagttgatctaatcagcagatatattaaggatactgggtgctaggttttttttgttatcttagaagtcaattacaaaagttgaaaaaggagaaaattagtgtgagcactgtggtgttttggaacaggagatagtggtgtgaactcatggtttccaacatataggtacatgtagaaataagtgtaaatgtaatgaataacaacacaggtggcccttcatatcttcggattctgcattctacaaattcaaccaactgcagatggaaaatattcagaaaaaacagtggrtggttattgcatctgtactgaacatgtatagatttttttttcttgtcattactccctaaacaatacagtataacaactagttatagtacttacagtgtattagatatcaataaataatctagaggccaggcgtggtggctcacgcctgcaatcccagcattttgggaggccgaagtgggcggattacctgaggtcaggagttcgagaccagcctggccaacatggtgaaaccctgtctctactaaaaatacaaaaaatggccagacgtggtggcaggtgcctgtaatcccagctactcaggaggctgaggcaggagaatcacttgaacctgggaggcggaggttgcagtgagcagagatcatgccattgcattccarcctgggtgacaaaagtgaaactccatctcaaaaaaaagtaatctagaggtgatttaaagtatacaggaggatgtgcataggttatatgcaaatactacaccattttatatgagggacttgagcatccatggattttggtgtctttgggagtcctagaaccaatcccctttggataccgagggacaactgtacatattttgtgtgtgtgtgtgtgtgtgtgtgtgtgtgtgttttatagcaatcagtgtacttagtttccagtgagcacagctggtttctagatcttggtctctaaatgctctccattactaaaaggaacctcttgtgccagaaagtaaggaagtattcaaagaagaaaagggaatctggcttaaagggctcccattggccaaatctgggacaatttgagcatcaaaataaatattgatattaacagattataaccagctgaataaaataggaatccactagtttataccaatattcctaattaataaattgtaagtgtgattcagaaacataatatttgcagtcagtcttcatcattctcagattccttatttgcaaattttcctactcactaaaattcgtttgtgactcaaatccaatactggcattttcacagtcattcttgggcatgcttagcagtgaaaaatttgagttgcccagcattgtcaccagctgaggtcaaacaggtggtgctctgccttctcatttcagcgctcacactgggagccaatgtccttcttgcagtctgtttcatgccatgtttttcaaagttttgtgcagttttttgaggattcrccatttagtatggcccccaagcatagtactgaagtgctggctattgctcctgagtgcaggaaggctgtgacgtgccttctggagagaatacatgttatgtaagctttgttcaggcatgagtgatgtgccrttggccatgagttcagtgttcatgaatcaacaatatatatcagataaggtgtgtttaaacagaaacacacataaaacaaggttatgtattaaacagtcgacaaaaatattgtgaccagggcctcacgggaacctaaccttgtattttccctaagagcaattactcagtatacagtgtaagtgtgttggtgacactcggtgtagaatgttaactacttattgcctgctaacagaactagaaccaactaccgactgtacatagttgcagagtatctcccccaccatacttagcaattgcagagtgaaagagaataacctaatagtgggaaaacctggcagctgatcaaagtgaacattatcagtaataggacaaatcacaattctaggctgcctgatagagggtatgagaacgtagcatcacttctctgttactcagccagaacttcacgatctgaatccaatagtcaggagacgttagacaaaacaaaattgagaaacattctaaaacataactggcccgtaatcttcaaaagtatcaggatgaagaaaagagttctaacttgaaggagactacacagacatgacaattaaatacaatgttctgaactgggtcctttggctgtaaaggactttaatgggacactggtgaaactcaaatggggtctaggattagacactagtgaagcatccatgttaacttcctcattttgatggttcttttgtggttatgtaagagaatatcctcgtaggaaatatttaaagtattctcagggcgttgggacatcttatttgcaaattaactttcaaatagttcaggaaaataattatttgtactgcacttgggactttttatgtaactttgtgattgtttcaaaatctaaactaatacactagacaacaaagctgcagtaaatagcattcacagagacaaaagaaaaagacgatttgcatgtataactgactcaagcaaccagaaagcagtaaagatgcagcttctcagccgcagagcatggcaacagatagcacaaaatagttagcaatttcacatccagaaataccgaaagtaacaaggcatggatcccacaggcaatcagatgaagaatttgcattttctcccttcgttttcggcttaaatttctttctgctgtaaccagtgagtcaaaagcagcagagacattgctatactattaaatgcttaattttatagacttttaaataccactatgcgacattatcctggcctaccaacaactgagaaaataaggacttgaagaaaacaagggcagcagaaatagtctctataggaaaaatgtaaaggagtgatgacaggaagagtggagaacacttatatgatacaaccgaaaggtcatatgataagaaaggcatgacattattaataagcaacatatgaggcctgttaaggaaacctggctgttctcagttcttctgataygaccccgttacacttatcctatggagaattggcccataggagagtccacaagctctaatttcaggaggcccaactgtcacatatgtttctctatcaatacatcacttatggagcttgtgagtgaggagtggtacaggtggatgtaggcttaagatttcgaagtgacactcttacttcacacwtaggtgggtggattaaaatgtaatggaatactgtaaaacaagaggcagtggtgcaatctctttcaaaatgtggaattagtaatgtcctcgatgagtctgaggacagtttattttttgaagatagtgatgactcagttcctaacacagtaaggccattggtgaagagagtcatccagagtctagctgtgatgtcaggtttttatgctttaggattgataatgtagttaactgtgaatatgatcatttgctagattttttagtacaaagactaatatgttcatagtattttccattttgttttcttattttttatgtagttttggtgcttttaactatgatatttgttgtcacacacgtttctgttagaattcattttttttttaacgtaccttactgtggactgaggttcagtaaagcatttacttttttgtaagcatgaggagaattccttgagatgcattatgttactttatgttttgcattgagtgttactaaactattactctgactgcctgcgtaagaactcattcatatttattatattttgctacttcctttttactcatttctttgtatataccacattgaaaaatgattcagatttattttatattggaacttgctttttattcttaacagccactgaaatcactgaaattttagactaggcrtatgcagtgctgaggtagcttatgagatttcacgttctagtcaatgtattacatcttgtgtttctgctgtgtagcaccactcccatgatctcatacacttcttttttgatcatgtgattttatactcccccccaacagtctgtagaatattactaattatccagaacttatgtttcttcctgatttctagccataaaatattctatttacatgagcaaaataatgttttctctgtaaaactactaaaccactttcaatatatgtattaataacaagttaacattatttttccaaaaatttccttacaaagttggagtgcatctttacrtatcagtatattttatacactagcaaatttgctgttagcactttcatgttccatttcctaaggatttagaataatcttcatggttataaacttaatggcagcatagtactctgcaattttaatttgtcttttttagtaaactgttcgccttgttagaaatttaggtcgcttccaggtttctttgctttcttcttccttttttaaatgtaattrtcctggcctccactacagctaaacttcatagaactttctactgctgttgaagtaatctcttagagtagtataatctgggagaaggattacgcatggtaaagggtctaagcatcttttcattattattatacttcttaaatcctttctggaacaaggggaaaataaataaatgttacagtttttgctatgaatattgatatggctttccaaagggattataccagtttaaagtaaacatttactggttttatcacaacctctatagaattgggtgctttatagtatttttattttatttaattaagggtattaatttgcatttccctagtttcccttgtaactgattattatttgtgtttcttcttacatcagttgtatgtttatatttaatttgccagtcatgaaatttggattataaatattgtctttttattgagaaagctcagaaaaagttcataaatgttgcctcattttgaattctttcctctcacccaaacgaataggagactagggaaccaagaggccacattcatgttcgtataggacacttagcacataataacaatctgatagctgttttctagtaaaacagcttcatatctctatttaaaaaccttaaattcggccaggcacagtggctctcgtgtgtaatcccagcacttcgggaggccgtggcaggtagatcgcttgagcctaggagttcaagaccagcctgggaaacacggtgaaacctcatctctaccaataaataaaaacattttaaaaattagccagatgaggtggcacatgcctgtagtcccagctgctcaggagtctgaggtgggagaatcacttgagcctgggaggttgaggctgcaataagatgtaattgctccactgcactccagcctaggcaacagagtaagaccctgtctccaaaaacaaaaaccctgaaattccatttcaaagtgtttcaaaatttatattcagatagaactagaatttggtaactagaattttggaattcagacattatctaaaatgtctagacttttagaaagaaacttgtatcaggctgggygtggtggctcacgcctgttttcccagcagtttggaaggccaaggcgggcagatcacctgaggtcaggagttcaagaccagcctggccaacatggcaaaaccctgtctctactaaaaatacaaaaaaaattagctgagtgtggtggtgggcacctataatcccagctacttgggaggctgaggcagtagaattgcttgaacctgggaggcagaggttgcagtgagctgagatcgtgccactgcactcagcctggtgacagagtgagactccatctcaaaaaaaaataaaataaaaaagaaacctgtatcaaaagctagatagtaaaattttgaaataaaagtgctcagaaaaatgttaattgctaacttaaacattatagtcaaatgtgtatgagaaggctgagtgtttatacagcatcaagtggctgagaagctttctgatttgggaagagagactcatggggattttactcagcaatgtttttttctagcttcagccttaaagttttagagcaattctgagactgtagaaaattgctgttagtcttaagactacagttaagcaccctgactctgtttaatttgatattagttatgtcttgctaggaagaaaccactggcaaaggagaaaagtctccttccaggatatttagtccagatgatttttaataattatagtttatttatttttgtttgaaatcattgtaaaggaaaatcatttgtgtctttctgttcagtgcctttagaaaatctgcatagcctccatggaggttcacctagtggcagcttccaccaattataggcaacacactgttgactggtgaagctgaacttacaaggtttatgtggagaaggaccttttttttgttgttgttttgagacgaagtctaacccttgtcacctaggctggagtgcagtggcacaatctcagctcactgcaacctccgcctcacaggttcaagcaattctcctgcctcatcctcctgagtagctgggattacaggctcccatcaccgcgcccagctaatttttatacttttagtagagacggggtttcgccatgtcggccaggctggtttcgaactcctgacctcaggtgatccacctgcctcggccacccaaagtgctgggattacaggcgtgagccaccatgcccggccaagaagaaacttaggcaggtatcagaagggagaatggaggaaaggaagataatttgagtgagaacacaatgtttcacacttttaaaattttactgtattttactgatagattacttgatgtttttaattggttattttccccaccctgccctacccattaccttttttttaaaaagactatttatactttttagttttatgacagttgagttaggaacatcttccagggtgtttttatgaagcagcatcctaatagaagattctgtgttccagccctgaagggtgcagtcaatgattaaatgtaaaattctgtccagacacatgatggagccayattaaactgttgctgccctcaggctatttgacagctgtctgctgatgtgatatttaaatcatcatgaaacattagaataggaataccaattcacaacccaagcatgtttctgaagtatgagcaactgcagacaaaaaaaggcctagacatcacttgaaaggtttctgatgagcaaattgcaaatatcagcacctctaagcttgaaatgttacctgttgaaatagaacagtgaatgttcttgtatgtaatcgatcttcaggccaagaaagtggaactagattgaatcaaatggagaaacgtaaaaataattttaactcctacctagatgaatgcagcaagctcagatagtcagtaatctcatctaggttttcaactcctagaagactgtaacaatgcctgcttatatagtccagattgcttactgcagtactctgtccattgaacatgttcagcatacatagaattatctcttttcattttcagtgaaaaagactttgtcactgaaactggcaattaccacatttctgttccttaatgaggaaaaacttccatctggtatactcgcagcacgatactaccaaagaccattgaatccatgttgcattctcatagtggcagacgtaaatttgaggacatttgtgaattgtcagcatcaatgtgaatgcctctgttaccaggtcctcactgacttgtgctctctggtaatcagggccagcttcaaggatatgtgacccatgcagtctcatagggtcttgcgcttggcttaatattctgctgtcaccgtcttgaaattattaataatttttttcacaaggactcatgttctcattttgcaccgggccccacagattctgtagcagcctcctgggtctttttatcatacagttctgcttaccaacactgtatgtaaaaccttccctagagagtttacgtctattgaaattttaatgtcttttgaaagtaccagtttgttattaaaaatatttgtagagatcatctccccttaccttcccatcccctcttcccactgcctgtggagacagtgcacctgaagcgtggccagcagcgtgcctggcacctgactgatgcagaggtaaggagagggagtgcagagatggcaactgcagttgttgggagattagttacattgagcaaagaagttatttgatttagcaaatgagtagatgtcctaaagataaggagagccagttttctcactccctgaagggatttacaaacatttaaaaggtgaaagctgaaaagaacaccaacgtaccatgttagtattggaattatcagtatgaacttacgggtttaaaaatttatatatagaaatagttatagcgtgtatgtttatatatataaatatatgtctctctctgtgtgtgtatgtgtgtatgcatgcatatatttcttagtagtatgtactgagaggttctagaggcaatgacacccagcagtaataaacacagtgagttccaagattatagtttctaaagccactctccactaaaagaaatcagtgcttagaaaaatggccatttccagggctgggcagcaaacatacaggatgaacacagaacatcttgtcwttccagagagtaagtaaataatcaaagaatgacaggtcatgtcagaaggacccagaaaccagcctgaatgcatacccactggcaaaaatctaatgtcagcaacaaaataaataatgttaatattagttaaaaacttgtataaaataggaatccataagtttgtactgatatacataaatgaatagataaataggaaagaagggaaaagtcttccttacatacaaggtcaactagtaaatatagaagggatggtagaaatagtaactatttggcaaccattagattagtagtaaatgctactactaatagcatttacattggtgtaatactacagtactacactacattggtgtaatactacaatagcattaggtgatagacacaggagtcatcagtcaatatgagactagtagttgtaggtttgatgaggaacagggtgttgtcatgatattgacatttcttcccataaaatattactcagatgtaaagggggaaatggtgaccatggtgtagatagccggcagacgcagtcttgaccagggcatcctgtgatgaaacaggtcaatatagcatgcctatattattcactgagacagggcatcatttctgtggtattcctgccaagaattcatggcctctggtcatgaggaaacactagacacatccagtgagaataaagactttctaactggataccattaagtatggtgttagcgataggcatttttagatactctttatcaagttgaggaagttcccctttattcctagtttactgagagcttttatcatgaatgggtgttggattttgtcaaatgcactttctgtatcgactaatattgtgagattttctactttagctcattgttttgataaattatgataaatcgcacttggtttcaacatattctttttatgcatttgatacattggatttcatttgctaatattttgttgaggatttttgcatctatgttcatgagagatgttggtctgtagttgctgtgatctgaatgttcctcacccacaaaaaaataaaaattcatgtgttgaaatccataccatcaggaggtgggaccttttgggatgtgattaggttaataaggcagagccctcatgaatggggttagttactcaatataagaggccccagagaactgcctcattccttccatcatatgagacacagcaagaaggcaccatctgtgagaaagtgggccctcaccaggcactgaatatgcaagtaccttaatcttggccaccagaactggaagaaataaattcctgttgttcataatctaaacagttcatggtattttgttagagcagctcgaacagactcagacagtagttttcttgtaagttctttgtctggttttggtattaaggatgctggcctcacagaatgagttaagaactactaagaagtattccctctgcttctgtcctctgaaagagattgtagagaattggcatagtcttgcttaaatgtttggtagaattcaccagtgatagagtcttattcagattgagtatttcttcttgtgagttttggcagattgtatctttcagggactttgtccatttcatctaggttatcaaatttgtgggcatagagttgttcatagttttccattgttatccttttaatgttcgtgggctccgtagtgatgtctcctctttcacttctgatactaggcgtttccatcctctcctttttgttagcttggctagaggctaatcagcttttgattggtctcttcaaagaaccagtttttggtttcattgatttgtttctctgttgatttcctgtttcaatttcaatttccactctaattcttattatttatgttctcctgcttactttggatttaatttactcatagtttcctaagatggaaatttagattttttattttagattattcttctaatataggcattcagtgctataaattttcctctaagcactgcttttgctgccctcgttctttgtttctatttttgtcttccattctttttctgccctttgtggttttaattaagcattatgtattattccattttctctcctttcttagcatatcagttattcttctttttttactttttctttccagtggttgccctagaatttgcaatgtgcatttactactaatctgaattcactttcaaataacactataccacttcacttcacaggtaatgtgatacctttataataacaaaataatcctaattcctccctcctgtccygtgtgtcattgctgtcattcatttcacttaaatacatgcataagtaagcatttgtatatatgtatgtatatacacacacataagctatctatagcagcatacataattgaatacattgttgctattgaacaaactctgttagatcattttaaaataagaaaaaggaaaggttttattttacccttgtttttgttcaacatttctctttatgtaggtctgagtttctgacccatatcattttccttctctctaaagaatttcttttaacgtttcttgcaaggcagatctattagcaacaaattccctgaatttttgtctgagaaagcctttttctctcctttattatcctttgaaagaatactttcataggattcagaattctaggttggtggcgggtgttttttttcctatcagcactttaaatacttcactgtactctcttcttgcttgcatggtttcttaggggaagttggatataatttttatttttctctatacgtaaggtgtttccccccctccccagcttctttcaggaatgttctttatctttttattttctgtagtttgaaaatgaaatgcctacatgtaggttttgggggcatttatcctgtttggtattctctgagcttcctggatctgtggtttggtgtctgatattaattctgggaatttctcagtcacttgtttcaaatatttcttatrttattttgtttcttctctttctggtgttcttattacacatgttacaccttttatttattttagagacagggtctcactcttacccaagccgttctcccacctcagcctcccaaataatcgggactacaggcatgtgcctccgttttttgtggggatgtggtctcattatgttgtctaggctggtctcaaacttctgggctcaagtgatcttcctgcctcggccttccagagtgctgagattataggtgtgagccaccgtactcggcctgtgtgacacattttgtaattgtcccacagttcttggaaattctgttctatttctttcagtctttgttgtctttgcttttccattttcagagtttctcttgataatatctcaagcctagagattcttttctcagccatgtctgtctactaataagcccatcacaggcattctttatttctgtttcggtgattttttgatctctagcatttctttttagtgtttcttcagattttccatctttctgcttacattcccctctgtccttaaattctagctaccttttccgtcagagccttcagcgtgttaattatagttgttttaacttcctggtctgatgattccaacatccctgccatgtctgttccttattcttgctctgtctcttcaagttgtatcttttgccttttggtatgccttctaattttttcttcatagtcggacatataatgttctaggtaaaaggaattgctgtaaataggcttatagtaacccgatggtaagatgatgggggagaagtgttcgctagtcctgtgattaggtcttagtctttcagtgagcctatgcccctggactgtgaacatcacaagggtttctcagtttttcctacgcccttagatgggacaggatgactagagtgggcaggagttggatatttccttcccccaggtcagttaggctctggttaactagtttctcctgcaggaaggccttaattaagaaaagcagtgctaggtcatgtttcaaaatggtttcttttcccctctcccagccagaagcagaagggtttatttctctgatatttaatgtgaggatctggccaggttactggaggtaaatctcacaatattgtaggagttggcccatccggagtgtttaactctcagacttgtctgagcctccagcagttcatcggttagaattcaggttttcttaccttagtgttggtttctcacagcagtttccactcaggagtctctgctctgttaagccacgacttccactaggagtctctggtctctgttctgggaagccacaactccctctatttgcctctctgtctctccagccccggggcagtagtttaccttgtgtcttcccctcttataggtccagaagagttgtgacttttcagagtgttgaccttctayttgttcaagtagagtagcaacttacaagctccttaaatgcagaaccagaaactggaagtcccttctctgcctgtttttcacttgggttgtctttttgttgttgagttgtaagagttcattatatatgctagatataagtcccttatcagatacatgatttacatatattttctctcattctgtgagttatttttttcacttttttattggtatgatttgcagcacagacgtctttaattttgatgtagtctttttcctttgtcacttgtgctttggcgtcatgtataagaagctcggcagtggctgggcacagtggctcatgcctgtaatcccagcactttgggaggccgaggcaggtggatcacctgaggtcaggagttcaagaccagcctggccaacatggcaaaaccctatctctactaaaaatacaaaaattagccgggtgtggtggcaggcacctgtaatcccagctactcaggaggctgaggcaggagaatcgcttgaacctgggaggcgaaggttgcagtgagctgagatcatgccactgcactccagcctgggtgacagagcgagactccatctcaaaacaaaaaaataaatgtgctcagcagcatgaagtttacttctgtgttttrttctaacagttgtgtagttttagctcttactgcatttaggtctatgatccattttgagtaaatttcgtatatggtatgaggtaggggtccagtttcattcttttgcctatttgttgaaaagactattattttctcatagaattgtcttggtaccataaatgatttttaatgtgtaggtcytacatcctacctttgaaaccattactgaacatccaggtagctctgactatggtgttttaccagatgtcatatcctagaaaatccttgtggggtttacatgtcatttgcaagctttagtagtttccataatgaggcagactcagggtctgcctagccaaattgtcatttgccagcagagaacttaaagtaccaaagaagggcctaatattcttccctaatgtcaaattaaggctccaaagtgcctcagctttttatgattgtaaattatcagtctgtctagatgaatttttagttaatgttttacctttgccacttatcagattagtgaattccatgtgtttaatacctgtccacatttgtccctatcaagtttcaaagtatgctgtttagaaattagaacagttctttgaattctgtgtgccagtgaaaagagcaagcatgaagttgtgcatatgaattaataagtaaatcagtttcgtcataggtagggaggaagtttaatttggatgtagggaaggggcaataggataagagcaggacaacagagcatcatttatgactggggagctaatggagggaagttgtcctgttggttgagagatgggttctgcagccccttctgtgggctgggtaggctccgtgggcgagtctcttacacatcgttgtcctggattatctcctctgagtccattctacaaaggagactcttaaaaaccgtgttttctacctatggtaacagagctgatgagagtttaattgatgcctcttttaagggtttgagattttttaattggtttttggtgcattgggtaattaacttctcagtgaccagtttcctacatacagtcatccttcaacccacagaggccctacctttaggcctctgctctcttcctatgtccagccatccatggtattccgcacctcttcattcattttcttcttaattaactaaggatacagagaggagcactgccccaagtgtagtcctgagatgctatctcatgttcctaaatgcaagaaggctgttgtgtgccttagagaaattacatgtgttaggtaagctgctttgagttatagcgctgtccttgagttatagtgctgtccatgagttatagtgctgtggccatgagttcaatgttaatgaatcagctatatgttaaataaggtgcctttaaacagaaacatgcatcaaacaaggttatgcattgatcagttgaagatgttttaggggctcrcaggaacctaaccctgtatatcccctgtggacaatgctttagtattcactaattcagtattcacaacagcacaactatcatgaataacaagaattaaatgtatttgtcatgtaatgggcgctaacwctggttgccactgactttatcagattaattttgtgctgtgtatgatgttttaaattttaagttttatatatttcttatatgtgtatatatgagatgtatagccatatatttaatctatatgatgtatagccacatatttaataatttatatatttgtgagttctttataaattatttcagggtaaaaaagggcatttagaagactttggcttgtacaatctgaaacagtaaaattttaaaaatatacatatgttccttgccaaaattaaccatattttttactttagtagccttcatttagcgtcatctgattactaattttaaaatgtatttgattttaagaaaattatagttccaaagatagaaatttattttactgataactgttaagtaagccatatatgctaactctggtcactctaatatatacattttatgtcactctcagtttgaaagctccaatgtgtctttgccttaaagaattttgacttatctttgatttatagagtttgtatggcaactctcctggcttccagagcctaacagacttacttgtatagcttttaaagctaatcgattggcttttgatacttttgctggaggaatatcttattaaaatcaaatggatgaagtagctaattgtatttaacatttgaagggataagtgaaaagaggaggaaaagactcaagttgattcaaaagcaaaatgagaagaaaagataattggcatattctccacatctttcctctgatcaaccacataggagacaaaacaaattagagacttgtctttgaacaggaagcagatgtgccgagcatatttttacttcagattttgttaactattttatctttagatactgatttttgtctagaggagagtgttggagcaactaaaatggaactcataacttcagctcttgatggaagtttccttgatgcctggcactttatgctgtattaatgccaggaaataaattttatttcctcctgtctttaggcaagctgttattcctctaatgcacagtcacttttaacttagatttttgagaaacaaggaaaaaagatttaatctttgagaccagttgttggctaaggcaggcgtttgagcatcccagttacttgtcattcagcagctgtgtgggaaaatgtaagctacattgttgaacagattttgtaaaggaaaaaatttatttcttgatttatttggtacaaatgtctctttactcaaaaaatctttacaaatggttattgggcattcagtcatttgcttagcactctgtaattttataaagtgatttccatcaggtgcctttcacagaaaccctgaaggtcaggggaaatcataatttccttgatgagaaagctgaggcatagagaagctccttgttaggaggctttgcctctgatttcctggtcagcttcataggttttttgcttttttatttttgttctttttaacttttttaatatccttgccttactgctgtggagaatgatttctattttgcaacagcttatgtttttctcctgtgtacagggatattccaatgcctttagttagctcaggagtagagcatggtaacctgagagagctggcacttgcaagaatgaaagacctcggaatacaggtaagagcaaatatggcggtcaggccacamctgttgagaaaaagagaaatctgaaacacgaaagactttgccactaccacccctaaaaccagacttgcgggtcaggtcagaaagctcccagatgttgaaagcatagtcactgaactgtgtcggagctgaagccagtggtgcaggggctgcctccttttccttcattcccttctgctttcttctgcctgctcagattgccaactgtgtgccccactccagtttttaaaaacagtttttcttttgaagtattaggtattcagttattgactgaaggaaaaggagacgtgaatcctgaaaggaaagtataatcatttgaaaagacaagtattatgtgcatgaaataattgccaaaactgctattgccccacatataccagtctcctrtccctctggccattgaagtcccttcttcgctcacagatatttactaaacatctcctctgtgctggcccaggatatacaaagagcccaagaacctgcaacttaacagtctctgtgggaaattcttaagtcataggaaggtttaaaactccagtgctcaggaacttcttagagctgctaaagggataaaccaggagtggtgttgagaccaagggccgactcctgggctctgccttcatagattctggatcagtagattgggatgggacctatctgtttgttatccagcactaggtacatggttctcatgcacaattcagatttgggccacactttgaaagacatggttccaaggattgcatatggtgtttgtggacttaacctaagacattttattctctcactcaaattattakggagaaaatgtttcagaagattgttcaggggagagtttgtgaatattattggcatattctaccaaaaaaaaagtgaacaattttatgttccagaaaaatagcaaaggacaccaaacaagattgtgtgcctgctttgcctccaaggctccagctgtttgtgttctccatctcctctcgcctccaaraaggccactgaccttcaagaaggccaaggtgactgacctggcctggttatcccaacaatctcgttatccatccatcttctttaaccctcacccctcataagccttgttagcctctattaaagtaagctgggattgagtccaaaggctggaattcagtcatagccaaaatatatctagttcctataggcaacatcttgagcagaaaataagcacacaccaatctctgcctttaaaaaaagcatgccaaaaaaaaaaaaaaaaacagaaacagcatgcagatgttcattaagaacatggaacagtaatacattcccatgctagctactatatagaactattgtagtgaaaggacagcagctacattaagtagattaataattacagagattgatcatcttcgtctgctgtacagtttttgtttactggaattcatggactctacatcagcaaagcattgtcttgagctagttcctggggtgtggaagtagctttagttttctacaactgaataatgagctcttatttttctcttggaattctgtacatatatagcagtccttcataaaaatactattactagaaaagcttatgtgacatcatcaaatttcccacagtgatcttttcttactggaagaaaatgtttatggtttgttctatgggggggaaatataccataagatatataattgaataattacaatgatttataataatgaaaaggattgtgtaattgtaaatgtctggtagcatagcatgcactgtgggttgtggaatagaagtgagagccacatcacagatgcttggccatgcagaccagacattgcattggcattgtctgcaggcagctccatgccttctcagatattcaagagccatttgtgattgtgcttcaaagtatgtaatacatagctctaggttcctcctccctccctccctctcttccttccttccttctttccttccttccttccttcctcctttcctttcttccacagtgcccttcttgcaaaaaaaaaaaaaaaaaaaagccatcttcaacatgtaatttttggatattcctaaaatgatacaaatatggggatgctaaaaatgttaactgccgtaaaatggaggttttaaacatttaggaatttactttttactctttatatacatacttctggattgtactttcagatagttatatcccctaggcaaacctgtttcttacttttatgacttacattctttactgctaagattatattatatattgatctttttcgaattctaaatttattttaaaagcactactgtactacttcatacattcctactctggtttccccatcctcagattcattaaaggtggttttattttgaaattcagctcttttatctcactgcaagttatatgcaaacttaattttgagcccagggtttggtggagaggtttaaataaaaataaagattgaattggttaccagttttatatttgtacccctcccaccccccaaccccgctcacgccatttttttttgacagtgtcgagatgtgagaaccagagaagttggaatccaagaaattcatcacaaagtacggccataccaggttagtctcttcatgtcatagagggcctaggtactgtccttagatctttgccaaccctgggcccacatattcttaaccaaggacagagccccaggagtgaataactaagagcagagactaatcgaggattagataccggtgtcaaaccgtgaaagccaaatacaagaattctagaagagccaggttaggaaaacgaagtctgaacctcattctagattagcactgtccagtggaactttctgcagtgttggaaatgttctgtgatctgagctatccaatatccaatatggtggtgactgttgagcacttgcaatatggcttgtacaaatgaggaactaaatttttaatttaaaataaattcaattgtaaatagtcccctgtgactacgagctacatttgggaagagcatagtatgatctgcttctctctttatgtgtaactattcagctgttggcccaatggtgataagcaaatgaatagatcagcccttacccacaggctccacaaaaattaagcataatgccttaaggcattcatggtatgtaatgaattaacttttctcttatactcttataatgtctagctgtatgccagattttctgtaggatttgattctcttgtggaaccccatttgagaaaggctggaatagatgatctctgcattgatatttctgttctcagcatgaatcagttaattgacatttttcacatttaggaccttttgagagaaaaagtagacccaacacaatttgccagattcttgtgctgttcagttatttagcaaacattgttgagaaggaatatgtgttagtctgaattgttcaccttgctctgggtaccatctccccatctaccgagtgtttctgcgtgtggccatgtccatatgtatacttttctctgtgygtgcaatattgttacatatggcttctatttaagaaaagtacaagagccatttgtacaatgagctgaagagccaaaagcctgtgcagactgctaccacaaagcttccccccagaagctaccctccatgactgaactttctctaacatttttatcccataattatgcataatatttaagtgccctgtgggaggccacacttccttgaaatttcgtcaaggtgcaggtgaccagcatcacatttttcttccccaaagataggtttcagtggaggcgataaggactagaagatgaaacccaaaccattgaacacctgacagttttgagacaaaggggtgctcctgagagctacgcatgagacgtgattttgaaattttacattaagagactcttcatggggagtcaaatgcatggaagcctttactgagctggatctctgtaagagtctcaaggttaatgaagttcaagtatttgtgaaattatacagttattttccttttataatagtccatgaacaaggtgtgaactttaatcttggtgctatttgagagtagacaagtaaaaagaaacataattagtgattattcattccttatccctaactagatattaacctaaataaatacatacaattacaaaaatgaatttggttctttaattttgaataatattttttgtggctttttactaaataggttgaattggtaaggagagattatgttgcaaatggtggctgggaaacattcttgtcataygaagacccagatcaagacattttgattggcctcctacgattacgcaagtgttcagaagaaactttccgtttcgaattgggtggaggtgtctccatagtacgagagctgcatgtgtatgggagtgtggtccctgtgagcagccgggatcctactaaatttcagcatcaggtatcctgtattccatttctatttgacttctaagaaactgcctaagtaggaaaagagaaaaggaatggggtgaagagaagaggaagaggcagaggagcaggagaggggaaagagaagcatagaaacagaggagccagtgttttagttgttcagagatgttttctctccaaattgtatccttttgggaggaaaggataaactgagattcagtcagttggaacataacagattgaaccacatggawttggttttttttgagacagagcctcactttgtcacccaggccagagtgcagtggcgtgatcttggctcactgcaacctccgcctccctggttcaagtgattctcctgcctcagcctccctagtagctgggattacaggtgtgcaccaccatgcctgactaatttttgtatttttagtagagatggggtttcaccatgttggccaggctagtctcgaactcctgacctcagatgatccacccaccttggcctcccaaagtgctgagattacaggcatgagctactgtgcctggcctgcagttagtatttttgaaagtaagaaatcgtctaatactggcaatctcatatgggtcaacttattgtggagtcaggttagacagtaatgggaaagcacttatgaaacacttcctaaggttaagccatattatacataggggaaccctattctaaccccagacaacctaccttaatagctcacttttaaaaatttccagaaaatgtgttaaaacctaatggcggatatgatatacgagccaaaattgattatttaagaattttgcctggtttctcaactcttagaaagtagagaggtggccgggagtggtggctcacgcctgtaattccagccctttgggaggctgaggcagggggatcacctgaggtcaggagttcaagaccagcctggccaacctggtgaaaccctgtctctactaaaagtacaaaaattagctgggcgtggcggcacgtgcctgtagtcacagctactcaggaggctgagataggagaatcacttgagcctgggaggcggaggttgcagtgagccgagattgagccagagtgatctcgcccaatgcagtgagccactgcactccatccagcctggacaacagagggagattccgtctcaagagaaaaaaaaaaaaaaaaaaagtagagaggtgactaagaaattaaagacatactgccccagacttccatcatttagagattgcctagaacccacctaaaaagagactgaatttgagagggaattactgtcttcctgtgaatagattacatcatccacaacataccttttggtagttcttgttcaaaagttacacctttttcagttgtctgctacagtgtacctttggtaggattgaatggtttctttttccttactcccataagtgggctttttcactcttaacagattttagcaactactaaagtatatagccttcttgttttatggacccctcttaatgaacttccttcctttttaattcccactccccattgttgctccgtgcagggatttggcatgctgctgatggaggaagcagaaagaatagctagagaagaacatgggtctgggaaaatcgctgtgatatcaggtaactgggggagggcgaagttcatgattccttcccattttgaacttggcaccacagtgaaaactatgttggtaccctcttgcccctgttgatggttattacgttcaaaattgagctgagctgactggcgaaggacttgtgctcaaacaaaattcacaaaagcagtttagtggaatagagatttccgagccctctgagagtcaggacctgtgacccatatgccctcttctgcactctctgtcacactggtcagcatggtcgcctcctctttgtgctgtgcccagttactgtatctgaggaaatggaatttgatgatatggacaggagaaaaacatgagtgtttctcactgttgtggagattatcactattgttcagaaattaaaatagaacctcagttgccagtacgagctgtttaaaggccaaattcttgctctttcaattttgttctcagtaacttcaatcctggggaacagctttcccctgtttgggagtaaaaaagttttccccagccctcttagggtccctggctgggtccgaaaattaaactgacaaaggcagattaacaggggaaaagcatacacatttattgcatataaattttatggaacaggaaagcctttataaggaaataaagacccaaagaaatggctgaacctgagtgtttttatacgagtgcaaagtcatgaaaaaataagacaggacacaggagtaagagctaagggtgataaacgggaatgtttagcaaggcctgttcatttagatccctcaaggtgcccctctgccttcagagatgaagatgtttgtttgctccaggtggtgtgaggacaccttcctcatgaacatctcatgacctgcgtcaggggagaaggaaggggaaggtctaagggtccttcctgcatctgccattttctgattccttcaccttaagatactcagtatgccaagacaccgtcttttgcggtagtgtgttctgaaccccatcaggagcttccccattccttatctaggacagcaggtcactggggaagtgggcatgaaaaggaaaattcagtacagcatgtgtgagtggagcaaaaaatgacgtagacccctttcacatctgctgttccatagtgtatccttacagaaatcgctgttcccataagaagctaacagggtgagagccatgatcaaaatgtaggttatttttcatccagcatgtttgttttcccattagactactacattcctaaagctaaaatacgccttctgagaaaatcatctcttctgaaaatgaaagttgaaatgaggttttttwaaaaaaaataagttgttgccaatcagtaaatcaatacccatgcttgggttttaatgattataattatgaaaatgtaatgactcaggctcacttataatcatttagtgtggttgaggtttttggcattatccagacagattcctaaagctttttttttttttcacatgtctagctttatttatttatttttttttctgttatctttcatcgcacaaagaggtaactaaataaggctcacttgattggtactgttacctgtaattaaaaaaggtttacttctcaactgtttaacctgtggttgatcagaagtaccaggcaagggccagactgacttagaagccctctgcacatgtgtctgtgtagagttgataacacctgaaatttccatggccccttttgtcagagcactgttagcgttctagtaaagtgcttgtgaaacttcagtgtgcttacaaatcacctggagatcttgttaaaatgcaggctctgtctcagtgggcctgggtggggcctgtgctcccaggtgataccatgctgtcttcagaccacactttgtacacaaggaaggctttagtattctcttccaagtgtattctcttttcagtcactgagataacgacaacgctctgtgatccttgcagtgctacactcccagagtctgataatagtcaagtgactttctggtgtctgtgggaacctaatcaaatttaaaatggaagagcatgcatattccatcactgctctacatcatttcgtctgcctttatgacatctgtgtctttttacactgttgcatgcagagaggacccctggcttgcctgaggtcatatccaattgctcataagagcctcagtttctgctttttatgagcgggktgatttccattttctaagtggaaatcagcatctgccctctttctgccatatctatctccctagctttttatcataatctaaataatagctcaatttcagatcatctgcatgtagagtttctcaaataacaagaagagacttgctcaaattaacagggaagaacctttctcttgtcagctggtatgataggtctacttcatttctatacaaggggtttcttttggcagtgggtttctctgggaacagccctggaatgccttcttgggactctagtgagttcagaagggaggatgccgtaagcattacttcctgtcaccctgcctggaagccccaccattgctctctataggggaaactacgtacgcctggactttctgtttgacttaagctctggtcacccttcaaatgaaagaacaagaacatttgctgtctggatgatgcatttttatttctccaatttagtaatctattactgttctgtgtaagtttctgaatcagatgccggagaagttagtccattattaagaacttcaaggagggcagatgtgaagagcttattattatatggtgtttttaatgttgtgtttttccggtttttgcattttgactttggtttctctgatgtgagtacagtgatgtgtgtgcgtgtgttttagttttttgtaaataggcagttattctccataaattaatccttagaatgaaaatctctttatgaccgtgctggtgtctgtgggctgcattttgtcagcgttacctcattggattagctgagaagaggcactgatttggatgggagtggggtggggaggacgggtggccaggattccattcctgctttgccagtagctcttcttgtgatctaggataattttacttactctccatgggcctttatttccgtattttaaaaaagtggatgtggttatcttttacagttctgactctagaattctaccccttagtatcttctttagttctcagcatgaccaattatgttttcctaattaaattgtaggtgggaccttttctgtgccatattaagagactctttaatttcatcaataatagatctcggtctcgttgtaggttgggtgtttgctgatgaaaatggcgatagtttcccataggtagttaatcctatgctttgtgaatgyctgttaacttaggtcacaactggtgatacygtttgacctaagtgtttacttttcttccgaccttgtcctcagtttgtaaatccatccttgttccaggtctgtaggcttttgtataagttgtacacagtggtggcctaratactctgtcctggcataactagtaagcttgagtaagggaaagatagaatcatttatcattttggttactgttgtgtaagagtaatrcatttaggtagaattttttaattgcattttgattcattatgacttcccttcatcttgccagattttctctgtaacttgggtttatratcttggattcagcctctagacaatattatgaactacacagtagatctgatttgagtcactatagaaagactctgggtattcttttttctgtatttaaaaacaaattggttttttatctgtgctacttcagtagactttgtttataggtatatactgtgtattttatagcagattatctttttaaaaagatgactacctttatggctacatgagaaaattgaaaactttctcatttatcaaaatcaaatgaagcaatttcttgaaaaagaggcctttaggtttattctgtttttttcttagtgaactgtgttttaaagtgaaccatcaactctaaatgtgaaaattaaactaaaaatgaaatgttcagtttcatcagcatcaaagtcaccgtgtattgagggctcacgtatgaaatgaagagacatatgaaaaaagaagatgtgtgaaatgtcaccctgccctgcgtgaaygttcgtgttgggctayaggaaactcacccaccttcccctcgttgattgtctttgactgcagaggaagataagttttctccctacttagactccagattagttcataactcaagattaattacttcacagtaagaaaatattatttttttacatataaaaatggacaaatcagtgttatgagaaccaccagtttataaaataatgtgtaggcaagaaataacagctaattgctgctaaatatctaagcaattaattagtccctattaattccaagtggtatcatttgccagcttaatccatatagcttctatcaacacacgtctgttcaaggttaacaaattgtgtttacttaaaaaccacgatgtttatctacttgggtgatcagcattctttcctttaaaaatgttaacatgagcagtttttctgtctcctctcttataatgtaaagtgcaaggaattatactggagaagctaaccacaacgtctgaaatgccatcactaataatcaccgtggaaacggagatctctgatgtcacactgcctgtaccatttccaaaagggcaaatagaactgtgatagtcactatttaaaaagccatttaacacccccaacagaatgagtttttttcttctggcagttttggctaggtatcagatccaatcgtgtgactgtttcagtttgccaagctaattgctatgcagcaagatgaccagctattycccaagctcgtctgactaccttcatcataagcagtattctatttgtgtcctttcaagtagaaaattaatatggccattggccaagaatcgtacaaggccgatggatcacacagtgatggtgaagaataaggaaaatgtctgaatggtcaatgacagaaatcactgaagtcagagactgatagccattttgtttaaatctattaaaaagccagagaaggggagaggagagaagaatttaaatatagggtgattaaatgagtcactatggagatgaaatcatccttaatcatgatggtcttagttatatgaccctaaaactacatcacagtgcctcctggtcagaaaataagtgtacctgcgccttatacaatccaatatggctttctaggactgcagttaatggtcttgtttgccagaaccactgattaataaaatcatatgtgggcagaaaatagcagttgttttgttgaagcatttaaactacaaatggctgagatttacttattcraccttcrcctgtctctcaggctactacacatctccctcagtttcaggagaagatagttttattccttgcattgtactctagttgaaaagaagggtacattcataactacgtttgtctgaaaatggactcataatccttaccaaaatgcctggaaaagcatttcttcattgtagcatatctatttgctaatggacacaggaagcctgccaaatgcagaccagtttgtggcacctacacgagtgttagtctatggcttctcagaaaggaagggaaagagtgtttgtccttttgtactatctttgtgacaaattatcccctaaatgtcccctaattaaatgtacattttctgggttctgtatattcctctgttccattttggtattctaayaaagatcatatatgtttcttttttggtgcatgttccagtagtatttttaaaatcattattaatatcttcttaaagacaatggatacaatataaagtatttctttactacaggaattcaatttcaacatcattattaatcagactggaattgatgatatggaatactactttgctagataatgtattagctaggtgtttgctwattggtgtctgttgtagctgcactgtggcagcattgttttgtagctcctcccaggaatctgtattccatgacttgacatttactcatttgaaggtgaatcaggtaccagtttgtagtacaccgcacatcaagtgcattagaccatctctaacttggcatcacagactatgttaattagtacacatgttttgaatattattgaataggccactaatgagtttctactgtttggatcttggaggcaactgaattttttgtgatgtttcccagccagaagctagtgatactgatttggagtggctgattggcatttgaagtacagcatttggcaaatgctgttgctaatcccaggtccatgcagtccagcctcttacatttcagagtgtgcatgttgagatcttraagtccagccttgccagtgtagacacaacagcacatttgtagactttttgtccccattcttgttcctcttagtttatggatatagggaatcatggtcttatgcttttgcttaggaggaatagggttatatcatgtgattcctaataacattcctgaaaggtctggaagctttgagatgaatgactacctttatttaaaattagacacttcacaggcttttttctgaggaagcaagccctctccaaaagtggcccaacctatgctactcactaccagctgtctatcagaaagtctgttttaatagtttgttgcaatgttgactccttatcaatgtaacttkaatatgaatagtactgttcttttctctaaatatttgacattgccttaattcattcaatttgataaagcttttctattttagatctgttagaggcagagatttggcaggttattctttgggtgaacaggtattactgaataatgctggaaaatattggtgctgccttccttagcagcaaccaagatactagttttgtggagccttttagtttagagatttctaattccaacagaacacatgcaaggaatttcttattctttagttggcctggcttaagctgttgtctctgaccaacaactcacatttctaagacagtgcctgttagacatagaattgtagtttgtggccatgggatcatttccttatgcaccccatcctctagtccctaagcagaccactgtccacttgtccaccattcatgaataaattgctggggttcagtaaagcagtccacatgccccagatctctacctgcgtgatctgttgcctcactgcaaatcctaataattagtgtttgttctggttatttattataacataccaccccaaagtttagtgacttaaaacaacaaccytcttatttccttaatgattctgtgggtcagaaattcagcagggcatagaggggatggttcctgtctgttctgtgatgtcaagggcctcagctggggtggcttaaatggcagccagytggctgggatggtgtgtctgaagtttcagttctgactggggctgtccmtatgagcagcttggttcttgtccacctgtctgctccatgtggcttgggctttttaatagcacaatagctggggttctaagagggaggagcaaaggcctggtcttagaagtcctagaatgtctatattagttatctgtcattgtgtaataaattacccaaaaacttaatggctgaaacaacaagcattttttatctcatggtttctgtagatcaggaatatgagagtgactgagctgggtgcctttggctcaacatctctaacaaggctgtagtcaaggtgtcagctggggccataatcatctcaagagtccattggagctgaaggatcccctcccaagttcactgtgcactytttggcaggcatcggttcctcacaagctgttggtcttggggctgtggttcctcgccatccctcgtgggcccatttatagggctgcttgtcacatgatgtgacagcttgctctctcagtgggagtgatcagagagagagagctcattcaagatggcagccatagtatttttataacctaatctcagaagagtgttaatgagtccacctcaccctcagggggaagggattagacaagtctgtgaataccctaggtggtgaactttgggggtcattttagagactgcctaccacaatgtatcttctgccttgttctgttggtcagagtcactgggccaggccagatttaagggaaaaggaagtaaattccatctctgtaagggagaaggcagccatctttggatgctgtcagccgtagtggtggaatacttctccattgctttgtgattagtaggcattcagtacctctaatgccttctccaaagatagaccctttgggcagacctaaattcaagaattcttgtcccaaccagattttcatatagtcaagcatggcaacacaatcacacctcacactttcctaggtagagcttggcaggtccaacaatactcagcctgcacctgaccctttgtgtgccatctctcttccgtgagkacatgcctctctgtttccctttgcaaccctattttatacctgatgctttaggtgcgcgtgctggccatttatctttttcttctaggtaatggaacatagaagcctggttttgggctgaggatacatggtttccctctggagctttcctacccttaaatacttattttccccctacaaacasatggagaaattttatgcattgtaagaaaatttttttcatttggggagttgataaatcataggtaaagtagaatttgccattttaaccatttttaagtgtataaatcagtggcattatttacatttacagtgttgtacgaccatcaccattatttctaaaatttttaacaccctaaacaaactgtgaacccattaagcagtaactcccagttccccgcacagtcctctaatctattttctgtctctgtgaagtggaatcatagagtatctgttcttttatgtctgggttatttcacttaccataatgtcttcagtgctcatccatgctgtagcatgtctcagaatttgcttccttgttatggcacaataatattccattacatgtatataccacattttgcttatcatccatcagtctgatagacatttcggttgtttccaccttttggctattgtcaataatattgcagggtgtacaaatacctgtttgagttctgctttcatttcttttgcatatatacccagaagtgtaattgctgagtcaaattgtaactctatgtttaactttttgaggaaccaccaaactattttccayagtaactgcactgtttttcattcccacccacagtgcacaaggatttcaatttctctacatctttgccaacacttgagatttttcttttttttyttttatagccatcctagtggtataaaatggcattctgtgggaggtttgactaatatttctgtaatgattaatgatgttgaatgtctttgtcatttttatcttctttagagagatgtctatttgggtctgttgcccatttyttaactggattgtttgtctttttgttgttgagttgtaggagttcttcatattttctgaatattagaccataaaatatttgcaaatgttttcttccattctgtgggttgccttttcactttcttgatactttcctttgatgcacaaaagtttgtaattttaatgaagtccagtttatctgtcttttgttatttgtgtctttggtattatatttaagaaaccattgccaaggtgaaggacataaagattttcctctctgttttcttctaagggctttatataaagttatagctctcaaatttagatctttgacctattttgagttcatttttgtatatgatataaggtaagagtctaatttaattattttgcatgtggatatccagtttttctagcaccacttgtgagagagacttttcttttcccattgaatgctcttgacacccttgtcagaaatcagtcgaaaagaaaagtgaaagtttatttctgggctctcagttctattttgctggcctatatgtccatctttacatcagtactatgctgttttaatcactgtagctttgtagtaattgggaagtatgagtctccaactttgtgcttctttttcaagattgtttttggcgatcccgggttccttcaaattccatatgatttttcacatggctgtttttatttcagcaaaagccactattgggattttgatagggattgcattgaatctttatatggctttgggtggtatcatcatcttaacaatgttaagtcttccaggccatgracacaggatatccttccatttatttagtcttctttaatttcttttagcaaagttttgtagttttcagtgtgccagtcttgcacctctttgcttaaatttattccgagatattttattcttttgatgctattgtgagatttttaaaattttgtttttgaattgttcattgtaagcatatagaaataaaactgatttttcttccatattgattttgtattatgcaactttgctagatttgtttattagctccaataatattgtatgtgtgtggattctttagcattgcctacatataaggtcatgtcatcttgaatagagatagttttacttattcctatccaatttgggtgcctttcatttcttattcttgcctaattcctctggctagaacctttaagtactgtggtgaaaatgggcaaccttatctggcttctgatcttagggggagaggtttctgtttttcacaattgagcatgatattattatctgtgagtttttcacatatggcctttacaatgttaaggaagttcccttctatgctaatgtattgggtgtttttatcatgaatgggttgtgagttttgtcaaatgctttttctgcatttgagctgattgtatgattttttttcccacttaattctgttttggtttattacattgatttttgtgtgttgaactatccttgcattccagggataaatcccacttggttgtggtatataatccttttaatatgctggtaaattcagtttgctggtattttgttgaggagtttggcgtctgtattcttaaggggatgatggtctatagttttctttgtagtgtctttatctggctttgataacagagtaatgctggctttattaaatgaattataaagtgtccatcctcttcagttttttgcaagtatttgagaaggattggtattaattcttcaattgtttggtagaatttactagtaaagtcgtctgattttgggctttttcttattgggacattttttattactgattcagtttcttgttatgtatttatgtagactttgtttatgagtcagtttttatgtttctagaaatttgtttcatctaggttatctaacatgttggcgtacagttgttcatagtattttcttatagaattcttatttctgtacagtaagtagttatgccccctcttttatttctgtttttgtgatttgagtcttctcttttttaacccaatctaaggtaaacattgctagttgatcttttcaaagaatgaacttttgattttgatttttttttttaattctctatcttcactctaatctattattttcttccttctgctagctttgggttttgtttgctctttttttttctagttccttaaggtgtagagtaggttattgatttcagatatatctgcttttaaaatcccaaatgtgatcatatgtatctgcttttttcatgtgagcatttacagctataagtttccctctgagcactgtttttgctgcatcctataagtttggaatgttgcattttgtctttcatttgctgaaggtgttttccaattttccttgtgatttcttctttagcccattggttgtttaagaatgtgttaatttctgcatacttatgagttttccagtttccatctgttattctagtttcatttctttgtgatcagaaaaggcattttatataatttcagtctttttaaatttattaagacatgttttcctgacctgacatatgatctatcccggaaaatgttctgtgtgcacttatggaaaatgtacattctgctattagtggtagcatgttctatatatgtctgttagatttaagtggtttaaagtgttgttctagttctccctttccttattgatcttttgtcttaatttttttattaattgttgaaagtggatattgaagtatccaagtcttaatgtagaactatttatttctcccttaagtcctgtcaagttttgcttcatatattttggggctctgttgttaggtgcatatatgttgataattgtataaatcttcctgatcattgaacatttatcaccatataatggtcttctgtctcttgtaacctgttttgacttaaaatttgttttgtctgataatataatcactctatgactcttttggttattagttgttttcttagtggttaccttggggatcataattaacattttaagcctccagtcagtttgaataataccaagtgagttttaatagtatgcaaacactctgctcctatacatctctktccctccccctctgtattgttattgtcacagattacatctttttacctgtgtatccattaacctagacttaaaattattgtttaatgaatttgccttttaaataatataggaagaaaagaggagttacaaaccaaaagtgcaataatactagcttttatgyttacttatgtaattatctttattaatattctttatttcttcatatggttccaagttactgcctattctttcaattcaggttgaatgacttcctttagcatttcttatagggcaggtttagtagtaataagcttctttagcttttcttaatctggaaatgtcctaatttctcttttatccttgaaggatagttttgttggatatagaattcttgattrgcagatttacttttttctttcagccagcactttaaatgtgccatcccattgccttctgacctccatagtttctaatatcagttgttagtctaattgaggattccttctatgtgatgactcattttgcctcttgctgctttcaagattctctcaggttttcaacagtttgactcatattgtgatcattgtggatctctttgaggytatcctgcttggaatttgctgagcttcttgaatgtatagattcatgtctttcaacaaatttgggaagtattcagccatttctttaaacatttttttctaccctttatgtctctcatctccctctgaaactccagcaatgcatatattggtatgcttgatggtatcccccacgtcttttatttttctacatgttttctttctgctcctcagactagataaattcagttgcattatcttaaagtccactgattctgtctgctgcctcctcttaactgccattgaacacctctagtgaattttttatttttactatcatacatctctgtgccagaatttctattttttaatataattcctgtctattgacattcctttttgatagtatccccttgatatcctttctttgtccatggtttcttgtaactccttaggcatatttaatacagttgatttaatgtctttgagtagtaatcccagtgtctggatttcctcaggaataatttctgttgaattcttttttcctgtgaatgagccattcttccctgttctttgtatgctttacaattttatattgaactactgagaactacacaattagtataatgtggtaactctggaaatcattcttctctttctgaggagttgcttttgaggtctgtaatcatgcatttgtctagtgacttttttttttttttttttttttggggagtcagtcttgctctgttacccaagctggagtacagtggcatgatctcggctcactgcaacctccgcctcccggtttcaagctattctcctgcctcagcctccctagtagctgggattacaggcatgtgccaccaggcctggctaatttttttgtatttttattagagacggggtttcaccttgttggccaagctagtctcgaactcctgacctcaagtgatccacctgccttggcctcccaaagtgctaggattacaggcatgagccactgcacccggccctgtctagtgacttttccaaactatttttgcaaagtctgagtgttcttcattgtgtgtgtagtcactgaaatttctgttcttatctctatgatcagcctgtgacctgagagggatttttcttaaatgtctggttcaaaaaaagaaaaaaggatgtgtatctcttcaaatcttttgatacactccacgaaggaagtgagatggggtcaaaacaaagacaagtgtctgcactggtccttccaggaacctccaaagtgaacataatacacagccctatatttttggaggactaggtccttattgcccactccagttccagccagctgctccaggaaaataagttaccattcctgtggctacggtggagctaaggaatgggggatggttggtggcttaagcatgctgttccctgagtgaagttttacagcctctccctcatcagacactcccctagtcactgtaagtatcttaccaagttccagcattccaaaatagttggttgcaattattttttttccagcgtaatcgtcgttttagcagaaggatgaatctctgaaaattcctaccttgccattttccctcttgaagtctgtatttaaagagactataaatagaaggggtccctcttcctaccaggttataagatggtacagtctaacttctgcagagacacactaatgatttttgacatgagtaaagaagtgagaatgatgtgtgacatagcaaacatcctgcactgatagaaacagagaccctctatttttgaatcagttgattgtgggccatcctatgtcacatcataggccagactccctgaaagaaaaaaactctctaagagctgtaagataacccaccagcatcacccaactgtaagttaccatggtagtatctatttagattctgtatacctcctttgtaaattacctaattttattctttgttcttatcttggtagccttttcaaaatgtgtagaagaacctttaggctgctgggtaggagactctcttgaggtactctgtatttccacagtgatggagaataatgtatactgtgttagttgcaataaccagtttgaagaactaagattatacatgggtaacctttgtatgattttttttttaatagaatggggaaaaaattctgaaaggtttagggtcgtgtagttaattggttcattttcaaacattcaggatagaaaccttttcccaactttcatatcagtgtacattgtcgaagagtaaaatatcgccatcctggcaggagatcaatgagaaataataaagtctcatttcaatagcaagtgaatgaaactaatgaatatatttccttgtgttaatgttggtagatacatcaagtaggcaatagttgattaattgaacccaaaagcaattaaaacagtttaatttgtttttatttcactgatttcttttaattaaacaatcataaatcatctgaatgttttgcatctaatcaaaacagaaatttgagctttaaaggatagatttacaagtttggctgtgagaatgtgatgtgggctcaattttaattctgtctaagaacacattactagcagtgaagggtggcctatgtcctaacaagtaagcatcaaagaacaagaatgcacctgtaatagctaattcattttcctgcttcagacatgaaaacatttaaattattaagccaaggtttttcttaaggaattccaagagataaaactcttcaatttccaggctcctagtacatactgagcaaatacttgatcaattaaacttatttcttcctctgttacatcacattaataattccacgttcattctttrtccagttggaatcacaaccctggctcacttgtttttccatagatgtgaagaattgatttcattccccatttaagcagtcacatagttgagattatttaatcttgccttctttttcattttaaaagtttactggaagctgtaacaaatagcagagtttataaaatgttaaataacacctgtatgtcttagctcactcaggctgctataacaaaactgggtaatttataaatgagaaatttctcatagttctagaggcctcgtgacctaattgtcacccaaagaccttacctcttaatactattgcattggggattaagtttcaacatacgaattttgtgggggatacacattcggaccatcgcactctctaacccccacttatgtcaataaccagcatccaagaagtgcctctgttggcccttccctcttccttcccagtatcctaacttttttggtattttcttcgtaagtatgtatcccttaactacatggtctagttttgttgttgcatatttttgttctggtyacttttgctcaacattgctgtaagattgagtcaacgttgtagtagctgtatttcattccttttcattgatatatgggattccattatgctgatagttcacgatttatccgtcttaactcttgctgggtttccaggttagagttatgaatattcttgtgtatgtattttgggacacataaggacatatttctgtagaatgtacacctaagagtgcaattgctgggttgtagagagtacatagatttagctgaggattctgccaagtggctttctaaagtgcttctacaatttttcactactacaggaaatgtatgagttttagttgttccattctgatgaatatgagtggcatttctttgtggttttaatttgcgttccctgataactgatgattttgactaccttttcatgtgtttactggccatttggagatcctctttctgaagttgctgtgtgcacatgtgtgtgtgagtttttctaaaatccacaagatatcattattatgtacagttagtattcatttagatttactgataaaattgacccttaaacaacacaggtccacttatactcggatttctttcaaccacacacagattgaaaacagtgtttgtggrttgtgaaacctgcgtatacagaaggctgacttttcatagacgcagcttctgcagggccaactgcaacacttgagtgtgtgcagattttggtatataagggtggtcctggaaccagccccccacatataacaagggcaactgtatatttaccacttctttgctcttctatctttgctatatcttcaaagtattttcttcattttcattgacatgtaggactccatgatgtactacagtttatctgttttactgttgatggatatttcggtagtttgcacacattgttttctttatacctttagttggtagcaagttgttccagttttggttgtatacaaatgtctttactttgcattattattaaagcagtggtccccaacctttttggcaccagggactggttttgtggaagacaatttttccacagatagtaagggggttggggtgatggtttcaggattcaagtgcgttacatttattgtgcactttattcctattattacattgtaatatataatgaaataattatatgaatcagtgggagctccaagcttattttcctgcaactcagcagtcccatctggggatgatgggaggcagtgacagatcatcaggcattagattcttataaggagcacacaacctaggtcccttgcatgcgtagttcacaataggatttgtgctcctttsagaatctaatgccactgctgacctgacaggaggtggttactgctcctcaggcagtaatgtgagcaatggggagtggctgtaaatgctgtgtggcctgggggttggggacccttgtcttgtcttcactaggtatagtattctgggtttgcaggtattttctttcagtacattgtatctatcttccccttatttcctggcttttaatgttgcaggtaagaaatcagctgtctgtctttgaggatattccctcaggctacttctgtggttttttagaaaatatattatttttattctttcagactgtcttggtttttctctagttttactaggatatttctaggttctaggtatggatttcccgtttgggcttccttgggcttctttaatcagtgaactggtttttaaaatcagttctgtgtgatttgcagcctctaacacatgcatattgactctatcccattctccctcacctctcttcctgtgactccagttaaacatattttagacatatttattgtatccactgtgtctaataccctcttccccaccaacgttgctttgttgtccataatttcttctgacttaatctttcaggttactaatttagctgtgtctgatctgctagacccatccattgatgcattggtcccacactttaacatttcctaaatttctggtatctttttccattctgtaatgtcgtcttttaatgtttccagttgttttcagacattgaacatagtaagcatacctgtttgcagtctgtgtcaagtgatgtcacatctggagtctctgctgtttcttgtcatgtcctgtcttaaagtgtacctcatcattttttatcatttgctgagcattttatatgagaatttgctttcaggaatacttcaagacctaggtgatgctagcttcctccaaggaagacctgtttcctttagccaggcatctcagagtcgtagttgtctaggaccaaggctgtggtttatctagaagattcctatccccaccacaccaatccctcctcccaattcagagcctttcagaatacaatccagaagagggggtgctatgcttgggtccctgtctgtgccaggctctgaattcagacccatgttgcatctccttgagcctcctcaaggtayggaagcaactctgcctctcagttgcttccacacctcctaaacagcagggcactgggggagtgttatgactgcttctctgcttctggtggccgcaagacactgcccccacgcccccagtatctcacgtgcccttcctagatcaaacacttctactcccctctggaagctcacattttctccttattattggcctgacaactaagagctcttaacagtctctgatactttcctagcagaaacattttcaattttgtctaatattttcattgtctttggctggagcgttattcttaattttgtctgccataatcaagcctgaagtcatctgttcactaagcttaaatactcrcgactcttctgcmctgcctctagcttccatcattgaaccttctttgttgttttcctccaaactctgtattgtagtgcttgtcattttagaaatggtgactgcaatttatcaagttgttactgaaaagtatcccccttcccattctcacatttgtaagctgaatctgtttacaaagtttattattgcctgttatcagacccttttctgtgatttattcttcagtttcttactaagccatattgttaacaatggaaatagccaccatgtttgtttcatctaatgagttatcaaaggacattgaaaaactggacacagatacaggaggtgaggtgatcaagacaartggcaagttctttctttaccagaaaagaagggatgtgctttcccacgaagactagaggtgcaagaccagagtcaggggagttgagtgggcctaccccatcacataggtgccaggcgcattagaaacgctctgggccatggggtcaggcaggctgggtctcagttactgttctgcttccctatagtgtggccttgagttatgacccattctgaaactcatctttctcctaggacaataattgcaatcttgttacattttaaataaattagtgcatggagaggctttagcaatccagtgcctggcaggtatttaaatctccctctaactttatagtcacttagctatcaagtggttttctttgtttgtttgtttgttttgagatggagttagaatcacaagctaggtagcacttaggttcatttcctgctcttgatttgtgatttattttcccttttagaggaaaggtatacttatttttagtgtccaaaggctttactctggtattgcatttatccccttagaacagaaggctgcagtaacttggaggaacaaagagttggttttcagtgaactcaggtaccacacagactggcttactctatctccccactctttcccctacaatttctctctaaaatagaatcacagcagaatttaagtaaacatctaggtttgcggccgggcacagtggctacacctgtaatcccagcacgttgggaggctgaggcacatggattgcctgaggtcaggagttcgagaccagcctggccaacatgttgaaaccctgtctccactaaaaatacaaaaaattagctgggtgtggtggcatgcacctgtaatcccaggtactctggaggctgaggcaggagaatcgtttgaagctgggcggcagaggttgcagtgagccgagatcacgccattgcactccagcctgggtgacaagagagagacttcgtctcaaaaacaaacaaaaaaaccacatctgggtttgttctccacccacccccccttttttttggcctttggttagtctaaggttgtgtgatttgatttcccatttttactaaagagcattgagcagcccaggatgagcgtgctcctgcagccagaggcccaggctccggcatatgcattgcctgtgattttccccctttcccgaatcctttgagttagcagattaagccacgtggtgcgtatcttttggagagggacatggaatcaaagcagaggatttctttctcatcatgaggggcttgaggacatttggttcagaaaaggatcagagagatgctgtacccctgggtctcctccgggttggagattcacagggaggccaggggctcttggcagccagccttggagcagtagccagaggtcatccttgggaagggggctttcccactgagtgctgaataactctactcctctcggcccatcccagagcaagcagtgtcctctgcctttaatgtaacccctttccatgggtctatctataattgatctaaagtgtgtgcagtggaagtcattttaataacttacatatagtaaagctcgtgtacaaataaacaggcttgttttcttctccccaaaggggtggatgtcctggggcagaggcagaggggaggccaccacagaagctgttcactctaggcactttgcaaggtattcttttttcacctaactcatcatcattgctggttgaatggggaagataaaatatttatcctgcctacagagtagggaaaaggtcatgtaggaaagctcagggtgtagatgagtgaacttgggaggataaaacaaagccagtgtttggactcccccaactcctgccattctttcttgagagagtctcgctgtgtcccccaggctggagtgcagtggcacgatctcagctcactgcaacctctgcctcctgggttcaagcaattctcacccctcagcctcasgagtagctgggattacaggcactcaccaccacacccagctaactttttgcatttttagtagagacagggttttgccatgttgcccaggctggtctcgaactcctgagctcaggtgatctaccctcctcagcctcccaaagtgctacaaaacaaagcctgcgtttggactctccccactcctgctgttcttaatgctggctctgtagcagggcaccctgaggccgctgcatggagtgagttcctgcacattccccatcccagggatttggcagaaccccacgcaggccatcgggtggagcacttggttccttgtacagcctgtgggcgcctctcctctggcggaggcagagcagttaggctgagggctcggagacggtccaggcagcctgcatgtcagtccaggagggtggctgacgtcagctctgaaggatgattgctttttcttggctggctaacaaaaggaaagttactatgacagaggactttctgggagccctgctgagcatggagaggggatcagagcagagcaaggccctcacccagccttggtggctaagtgcaggggtaatgcctttcccaacctgttctgcaggttgtagaaacaggaggaaatttttctttcaaaaaacaagaggcagaaagaaatttagctctttaggtgagcagaggttagagtccagactgactagaggtgaagttcccttccctggatgccagcacttctcagaggacctggagacagtgttccatctcagggctgagctcgccatctcaggcctgctgcgtcttattgaaaataaggacaagaacttcaatatacagctttcctccaaaaggcccatcgtgaggcctgagtgcccctgcccaaggtggtaatcgtttctagggcacaccccctgtagaaaggaaaaagtagaaggcccaaggagcctgtagctccgtgggaatcatgatgagaaatgcttagatgtaccccagtaaagcagctcttttaaccagcatgcttaagaaatcagggcactcttgattgttgaactttctggtyatccaaggactgtccagtcctgtgttagatgtaaggaactcttctctctcacctctgcagccatttatggtagacaratataggttgatgcatatttttggaagtaaagcactttgaccaacaattacacatcttccatcttaaaattaggccatcattttcatttgacagaggacatataaaagagcaaaactaaacatgtctccaggaactgagctgagcagaaccaaaaggaaatgttagagatgttttctaagttcacgtgagtagaaagctcgaaactcagaagtctcctgggtggaaggcggaggttgcagtgagccaagaccatgccattgcactccagcctgggtgacaagagcaaaactcccatctcaaaaaaaaaaaaaagagagagatctcctgggtgaattgtccctgctaaagctgagtgatgggtgcagggaggttcagtgcactgtcttctgcacttttgtgtgtttgacattctccaagatacattgttttaagtccatggaaaacagtatctgttttgtaaaagtaaaatagaaacataaaaagccagaagtatttctgaaagatttggggcagtttttgttagatagagataataatataagtcaggaagctgcctcttaatctctcagctaacaaggtaggaaatttgtacctaggttaagaagtcatcctgcccttcagctcttgtacattgaatcattccattacccaacacccaacatagagccaatttttttttcaaatacatcctccaggaacacatttctttgtatatacacaacataagaatagctgaacagcatatgagagatctgcaaacatttattgcatcttgattatatgccagacactgatgatagaagccattgactttaaagagctgacatcctagggagggagacagacctgcgcagtgtgattactaaaacagtggaactctaattaaggcacacagccagcctggagagagagtgctgtgaattctggcttctttgtagataggggaggtatctgcacaggtctcctggtgggggatgagtgggagggtggctgggagggccttagcagacagaatgggcggctgctgagggaagcgcccagaggcagtggctgagcccgcgtggtgatgctgggctggtttgctgatcctggacctagtcaactgtgccaggaactaaagttgaagggtctgggcaggaaagactttgtggatcaggctaaggaatttgaactttatcttgggacacatcattagtgattctaagcaggagagcagtgtgttcagaattactccgaattctgattttaaatagtggcttgacctcatttgtttttctcttcctgtcctcaagcttccttgtcagttatgatacttttagttaacaagtaacagaaaactcagctcagtgacttatacccaacatggatgaaccttgaagacattgtgctaagtgaaataagccagttataaaaggacaaatattacatgattccacttacatgtggtatctacaggagtcaaattcatggagacagaaagtagaaygggggttgtcaggggctgggagagggggagcaagtagggttggtgtttagtgggtacagagtttcagctttacaagataaagagttctggagatggatggtggtgatagttgtaccacagtgtgaatgtatttagcaacaccgagctgtatacttaaaagcaaaaatatcctcaaaatggcttaaaccaaatggaaaatatttcataagaaatatatagagaagctttgggactgattaattcagggttcggcaatttcaaaaaggagccaggtggctctgccttctcactcttcatcaccacttcagccccttggaagacaactgcccccgtccgaaattaccttgcaaagcaacatccaagaaaagagaccgtccctaagtccattttcgattgcttataacaggatacctgaaagggaatttatttattacagttttggaggctgaaaagtccaaggtcaaagggctggatctagtgagggccttcttgcaggtggggactttctgtggagtcctgcggtggcacaggatagcacatggcatcacacagtggtagggctgcatgtgccagctcaggaccctgttcctcttcttgtaaaaccactagaactcattatcctgttagtccatgaatagattaatcctttcatgagggcagagccctcacactctagtcacctcttcatagccccacctctcagtaatagggattaagtttcaacatgagtttcagaggagacaaatacctaacccatagcactccctgtgtctctttaagaacaacaaaagcttccaaaatcagagtcttcagcatcttggcatgaatgtctagcagccattccacatgcagcctgactggagccccactcctgattcctcttgcaagctcttcccaccatctcctcactcccaggcagtggtggctcctgtttctccagactcttcctttactcaggctaaataccctggagtcgccttggctcccgtcacaccccacatccgttggcagattcttttcgctctgccttccacatatgcccaggctctgggtacttttmaccactgtgactcagcccgagccaccaccatctcccacctggattattgtcatcgcttcctacctgatctccctatttctgcccttggtcacatatccattcagtgagcaaatatttaccgtgtacctcacatgtgacaggcatcactctgggtactggcagctctacagtgaataaaacaaaatccctgccctcctggagccttcattctgttctcaaaacagcagtcagatcatgtccctcctttgaccagcatcctctcattcttccatctcactcagaataaaagccagattccttaggagacctgcatgwtggtgcctccttgttccttgagtaagttgagtgcacgcccgtctcaggactttcacatttgtttttcctgctccctagaatcctgtcccccccatgtagcctcaggcctttctctttcattttattcaagtctcttgatttggaatttgacagaaagatgggaatgagttgccctgaacaactggcagtggagtggccatttacagagagggagcttcctgcggagggagcttgcggggcaggttaccaggagttgggtttttgacctgctacaccttccatgcaatttagacattcaggtgggtcatgcagcacctgtggacgaatctgaggctcaaggagagctctgagtgacagatttaggggttgccagtgtatacataggtttacgctcagtgtcacaggaagcgcgtgcacagaagagctgcatattgcagtgatttcagttagggatacgaggaggaagcagcaaaggagactaaggaagggcagccagcgagctagaggagaatcaggagatgcacttctccaaagcccagtgcagggacgtgcagagagggagggaaggacggagggagtgcctgtggcaggtgctgctgatcgctctccccgcccagcctcagctgtctcactcccaggcacagacagccgggctgtttgaggaatgcgtccaatatgcaggggtaatggacctttagtaccaacttcaactagttcatgttccttgaatgttgagacatcataaaaaatataatttggtctctgttcctggttcctgacatagagctcctaaaacccttgtaattttctgagchkcaggggttcaacctggtgactcttggtgggctcctgggtggggacctgtcaccagaaaaatgaagccatgaggagagggttgaaccttcagccccaccctccctcctccggggagggaagggggctggaaatggagttagtaattgatcatacctacacaatgaaactccataaaaatccctaaaagatggggttcagagaacttttcattttggcaaacacatccacttgctgggagcatggtgcaccccaacgcggtggggacaaacacttctgtgctcgggaccctcccagacctcacccagtgtgcctcttcacctggctgttcacttgtatcttttatcatatcctgtaataaactggtaaacgtaagtaaatgtttccctgagctctgtgagccattatgacaaattatcaaatctgaggaggggcttgtaggaaccctccatttgtagccaacttggacagcagttgtaggcaacctgcagcccctctgcttgcaattggtgtctgaagytgggggcagtctctggactgagctcagaactggggggccttgcgctcatcagagtaggtagggtccaaattgagttaaattrtagaacacccagttggtgtcaacagagaactggacagttgcttggtatggaaaacctacacttctcttcacaaaccacacttcatgagccagggccatcccagcaaagctgcttctttgacaccaactgatgaggaaaacactttttcctgttaagccttgtatacttccaacacttctgacagtagccacaagtgtaccttcgctactggggctgagtggagatcccattttttcccccactcttctctctttaaaacttctgggaaaccgtctatcgtttggcctcatctggagcataggcagctcagacagtaaatccacctcttstccttcacctgtagcacctaaggtggtgcctggtgttgccagtagggtagtgaatacgcaggctccaacacacgggtgcacacgtttgctgttgcctgtgagtgtgtgtgtcacataccctgagcttgagttaaaaatcagggaaagagacttcttctctccacttagcagtttctatattttaatgcagcctgaattcaaagtaataatgttccaaacttattaagctgagattttatgtgggagagaatttggtctctgggtgggagagagtgtaaggctgagggaagcacatgccgacttttgagaattgctaaagtgaatgctccttttttaacttcgatttttctgcaggggtcggcaccaggaattattatagaaagatcggctacagattacaaggcccgtacatggtgaagatgctgaaataatggccacaccagtccactcttctgcagtatcctccctggcagaacacggagaatcaggatttcttaaatactcaacagagaggctgagcagagcaaatggggggcttcaccctcatcccgcagctgcagagactggaaactgccttcaaggccacggctggtcatctgctgaccacaccscagatccgccctctcctgcgtgcaccccaaaaaatcacttgcgtttttgaggcttaaatcatctatccagtttctacattttgcatgaggcctgcaggtggcctattttgactcagacggtgaaaaaagcaaattaactcatttggacaccataactcatgcaataaaactgattgtcattcgaggagcaaacttaagagtagtttatttatataccctggggacagaaagtcaggttgaaacaggaaaaccaccagactctaatctcagccctttaacgacatacgcattggagcgcaagttaggaaaatgagcttttgttttcatggaaatcattctgattacagtgctgatgtttagaaataaatagcagtgtgactgggaaagaggaattgcagttgtgggggtgtgagcctggcagcagccagccagcagcctctcccaggcgggagtctaccatccgagacggcgatgacaaagagcttcattccacattctttgttatctctacttcccaccctcttggcaactacagagcagtgtgggcagccccaagtgtggtccccagagagcgtttggctttcctgtctgtctatcctgagcgggtggagtctcaggttgtgtgcccctaaatcaagatttgcttccacagaagccattacttgcaattttttttttttttctgagaaagtctcgctgtgtcacccaggctggagtgcagtggcgcaatctcactgcatcctcygcctcccgggttcaagcgattctcccgcctcagcctcctgagtagctgggattacaggcacccgccgctgctaatttttgtatttttagtagagatgggggtttcaccatattggtcaggctggtctcgaactcctgacctcaggtgatcaacccaccttggcctccctaaatgccgggattacaggcatgagccaccgctcccagcctttgattttttaaggtggattttggttgttataaatggagaaaggtaagagttcaagtwcaacccgtgtgtgaaagcaaaacaatggaaaacaggattggcttcttcaaaggctcctcttgtagaactgcctctttgaaatttcgaggtaatctactttggagactctgcctggagagggtcagttcctaagttaaaagcatcgcttaaccttggctcctgtggcattttacaaaggtttaaaggaattgattcctctgaaagggcctgaaaataaaaagtctttaacatacaaagaagagtcatgtggttttctttctctccctgtaaatgcagtgacatttgccacaaatgtgcaggtttcagtttccaacctatggcactgttcatttcctcccgggtgctgtttgccatttcattaaactgctatgaggcaaatggcagtggctttgttatgggctggctgtggaaccaccacagctttccatgagtgtcgtttagggacttagctacttctcaattatgcttttttaccctataaaaataaaacaataaagcctactcccgctggttgtcagagctgtgttgctggagacagaaccagctgcgcagccctggagcacaaagtctctgggcctcgaccttctcatctgtcctaggtgcccaaatggatccacacacataaaagggcttttgtgaaatggtaaaaaggcctgcatgtggaaagttcacttcaaaagatgacaatttagggaatttgaaacaaaatgacaggaacttgcacctttctgatggctgtcagctattattgaatcctggttttatctcaggattcacgagaatccctctttctagctcatccctggccttccttgccgtatcttgtggcctgtgcaaaacggcagcagttggggagcttcccccgggtgtcagagctcccgcctccctctgccaccagaagcttccgcttctcttgtgactgccagggctcgttccggcacggatggtgcttggcacctccactgtccggctggtctgtctgctccgaggcctgtggggccacctcataagaaagctcagttgggcacaattctgctggcctcagtgtgaaaccatcacagctgcaggctgatcccatctgaatggaaggactccttagcaaccacctccaatctagaaagctctgcttttagctcaacttctggctacatcacctgaagtttttttttttttttctttttttaattcaagtcatatcaaaaacagactgaaataaatttgaagagaaaatgagatttttaaaatacattatcaccgaatgaaagggcctggtaaaactcattgttcctcccatttgggaacaagcaaaccgcttttccattttccatctctgcaggccctaaagtactgcaaagacaactcaaaaaccaacgcctgttcccctaaaacgtctttcagattgcaaattttcattgccaatggggttttggcttttttgttttcaagattatcacattgaaaacagaaaatcctgctcctaaagaactcacagacccctgagtttaccaaaaaaaaaaaagcacaagatctggaatctgaaaacctggtttcctcattaaccatgaagctttgagcaaggcccctccccgttttgagctaccatttccctatttgtaaacacgtgtctctcggggcaagcataggaatcagatgtggcatttgagagacattgcataaaccaggacatataccaatagttgttgctgcccccactgaagtggcttcactgctgatgtgtgaccttgggcaagtcaaccctgcaaagtttcttcatctgtaagatgggagtgaggactacagaagcccatgtatgcagggttcttagaacaggaagcatattatagacgcactagctttgattactaatatctagcaagtgcaatcgtcagcccatttttttttttcaatgagggagcttctctgctgacaatagaatttctgattctttgctacaatcttaagtttttctagaagcccatgtcagaagaatagtatctctgatgctccaagaccctattctcctcctcctctggtctattttattccacaagtctagggttgcacattgtcaaatccattccttgagggccaagatcctagctgagactgcaacagcaaaaagcattttgaaataccgctgtcactggagtggcttcctggaaagttgtccagcagcagcacgcattgccgatcccagtgtgagctggtggctgtgtccgcctagggagtctggcagccatttgtggcaggggttggcatggggaggggacacctttctatatgttggagttgtgtacaccagtaatacacttgtgtttcattctgtgaaggcatttccaaaaatgatgtttcaagaaactgattttaatgtagacaaatccatgcctgtgaaaaagttgccactaggctgcttttctctatcctgccttcactaccgtcacccagatgtgcagctttatctcctttgtctctacacacctaattcccctcttgtccacctggaaaatgtctcatcattcaggggaacaaacgactatttgttgagcctccaccaggccctggactctgcctcaggtccttcaccttcctcatcttgggatatccccgcagcccccgccgtcctcaaggtcaataaggtaaggtgaatagtctccactactctttttttttttttttgaaacaggatctcactctgttgtccaggctggagtgcagtggcgcagtcatggcccactgtagccgtgcaaactcccaggctcaagcactcctcccacctcagtctcccgagtagctgggactacaggcatgcaccgctacactcagctaattttttgacttttttatagaggcgggagggggtctcgttgtgttgcccaggctggtcttgaactcctggactcaagcgatcctgccgcctcagcctcccaaagtgctgggattacaggcgtgagccaccgcgtctgaccttgcctccattacttaagtgaagaaggcaggctggtgtcttcacctctgagcctggcatcacaggaagccactgcggcacccaggtgcagtcacagtgccattccccaaatgtctggggattgcgtatactatagtctgaataggaccccggagtggcccagtgcagtggccctggtctcagtcattaaatgctaagacgcaagcttcgagaccgagtcagtgattcagcccttcccaccccacccggccccactcttcctcttctagaggaaagcgtttccagtcagcttatgttagatgctaacagaccgggcctgtgccttcagatgtggatttcaccctcatggcagcctgtgagagaagccctattatcagcatcccagcagttacaagtggtgggagaggaagtggatgatttcctcaagagagaatgcaaagtacagaaagagcctgctcttttcatttaaatgaaaatagcgcttgggggctctgaaaattatatatgctcattataacaaatggaaatggacagaaaagcacaaaataacctgaaatcccaccgtcagtgccagccgtggttaacattgtgatgaatgtccttccagccacctctctctatacacacacacacacacacacacacacacacacagacacacaatcagctttacatagaagagtcatattgtacacgttgcttcttttttactctacaagatgtaaagtaagcatctttccatttcaatatggatttacttgatggtttttttgtttgttttttgtttttgtttttttttttttttgcttttgagacacagtctcactgtctcccaggctggcgtgcagtggtactatcttggctcactgcagcctccaacttttgggctcatatgatcctcctgcctcagcctcccaagtagctggaactagaggtacgcaccatcacgcccagctaatttatttttttgtagagctgaggtctccctgtgttgcccatgctggtctcgaacccctggctcaagctactccatcctttgcagtgactacctagtggtcccctgtctgtaagtgcacggggggatttcagcaggcctttctaatctcacactctcatcatcacaatacctagaatcagatgtgaagcacaaatctgttggctcaataccaagatgtacttctttaatttcttttctacaatcactcattcatggccggtcccctttgttccccccgccccccgcctctttggttgtcccgccaccaagcctttcagtccttcactcatactggggaaggcctccctggctagtgcatgccctttcttatccagagggcagcagcacattcaaatcatgaacaagtcccatcacacaaaatgtcaagatgcctgctcactggaaggcactggtgcatgacaccctttactgaggtgagaggtgactgtaccttatcttttttcccctgatgtaagggactgcgccaagtcagatccctgcaccagctgcagacactcgtcatcttgtctgcaaggctagaaaatgtgaccaccagggagacttgatggtacctgctgtcaacatcagggcaggcagcagaggggctctcagtgcttggactgcccaagaaagaatggcggatcgtccagatgcctggggaccagtcttgcttctgcctctgtccagctctgcagggacagggaatgggtcaccacatgtctagggtgctgaggcagcaagcaaaggatcacctgcatctactgaaggaaggaaagtacaggaacattttggcaagaggaagaaagggaagtaatgcgctgagcagtcatgcctggtattgccccatgatggtcctcggagggaggaattaaggtcctcattttacaaatgagaaactcgggctgaaaacagctcagtaaattaaccaaggccacagagctagtcagagaaatgagtgtgaagacaacaaactggcccaatacagtggcccacgcctataatcccagaactttgagaggctgaggtgggaaaatccctggagctcaagagttcgagaccagcctgggcaacataatgatacccattctctataaaaaattagccaggtgtagtcgtacacacctacatttctacctactacagaggctgaggcaggaggatcgcttgagcccaggagttggaggctgcagtgagccatgattgtgccactgtactccagcctgggtgagaggaagaccctgtctcaaaacacacacacacaaaacaaattgacatttgcaaacttgcaaagattcatacttacgagcagtggttcctctagaatttctaaaacaaagtttctggctggcagttgggttggagaagggtttatcttgaagctacgtggcctggcagacattgtttgcccccatcacctgctccaagccacttcttggcacaacaactgccaatgggctcttgaaagacctcttaattaaaatacacagacaacagatacatccaaataaaaaactggtgaatagggacaatatggaaagaatgaactagtagcaagaaatcaatctgcttaaatagaaaactggaactaagtaactctgggagtgactgttacagaaaaaaatggaagtttctgggttaaaatggaggatggaacacgcacatctagtattgcttccacctggagctagatgtgtgcattccatcctcccttttaactaatgttaaagagagatgagggcctagcacagtgactcwcggtgactccccacacttggggaagccagagtgggagaattgcttgagcccaggagtttgagaccagcctgggcaacatagcaagaccctatctctacaaaaaatttttaaaaatcagccaggtgtgaaccctgatggcacacacctgtagtcccagtgatttgggagaggttgaggcagggggaccactggagcccagaagtttgaggctacagtgagctatgactgagctgctgcattccaacctgggtgataaagtgagacctgtcacaaaaaaaaaaaaaaaaaaaaagactaagtttgcctgatgcttacagatatggaaaaagagacaagtgagccacgcaggagaggaagccagaatgggctgtctagggtttgtccaaaagggcttcatagaggggcagagaggtcccagccaagaggtcccagtacagagaaactgaaagtcccctctcaccccacatccctagggccgcagaggagtaagtggccaagactacagatgggagc

SEQ ID NO: 93673 - DNA, 44515 bp, Homo sapiens
ctccttatagcatagatatggttgccatcaaaggtaaagcaaagattagcattcttacacccagaatgggcagaagaggtgttttcccaggggagggggttggccaaagcaacagaataatggaagtataattaataatataaggaaagttattgggcctaaaatttctggccacatttactcatttgatggtgactctgcaagcttcggctgtgcatagactagtcagcttccagagtgactagagcagggcttgctgttttatcaaggttttgccatgtgtggaatggttagcttctggagtgaccagagcaaggctgttgtggtcctcagtgacatctcggtctcatggcattatcagctggttcagatggtctgggtactcctggctggtccacttgtcctgggctgctagtttcagctaactgtagtggatccaagcacggttcctgtaacttgaacagcagttggagtggacaagattacaggatggggcccatcccatatgggtcctaatgtggttggattacatttcttaacccaaacagaatcaccaggtttgaaacggtatacagtgtctgtcagacttataggcattctttcctgcacccagccatgtacttttggcatggccatacctaaagcctgcatttgcctccttaaaattagttctcctagctcacagagatcacctttaatctgacatataattcaggtggccggctgaataagttctcctagggtgaatacccagtttgtttggcgtgggcacacctgacttggaggaggaccatgggcaagacctgatcccacctcagatgagtttcctaacaaaatttcttcagcagctgcttgagtgtccagttcatgtgctccacttttcttgagctctgtggccggtaggctgtgtgtaacttccattttatttttaatagccaagttcagtaatgaactatttcagccaccaatgctggttcattgtctgaccccagagtcaggggtagtccaaatctgggaataatgtcttttaacaacaccttggttacctctcgtttcttctctgtctgggtggggaaagcctcaaacaaccccgaaaaggtacaaataaacaccaacatgtaccaatagcctcctgcctgaagcagctcattaaaatccagaagcaaattttcacaggatgtggcttaaatttcttgaattcccggggttcgggtaggcccctgctgagggttgttctcggcacaagttagacattgttcacaaatggctcaggtaatggcagtgagccatggcacatagaaatgtcatcctagcaatgtttcttgtgccatttttcccatatgagttcctcggtggaactgtttcacaaacctgggggccaccatttcaggtatggctagcttcccatcaaaggttttccaccattctccctcaatgtatttcccagttttttgggcaaaccaggccctttcatttgaaatgtagcttggggtctccgggaggaggatctcccagaggggaggcatagctaaggctttctctctagaaggcagagctgccattgctgcctgttttgcctctttgtctgccttcctgttcctttagcttctagtgttcctgatttttggtgccctttgtagtgcaatactgccacctgtttccgggcccatacagtgtctaagagctgtagaatttcttccttgtattttagtttatttcctcctgcaactgcaggaggaaagaaagagttctctttctttgtaaatagtcccatgaacatggaaagtggcaaaagcatatttggagtgtggttaaaaatttgcttttaggtattttgctagtcagagaactcttgtcagagctgtcagctctgccttctgagcagaagttccagtaggcaaaaactgcacctctactactgagtccaaagtcaccactgcatgcccctcttggcgtactccctctagtatgaaactgctcaaatcagtaaaatactcaatgtccgggtctccgaggggctgatctgtcaaatctctctggcttgagaacacttaatctaccatatccacacaggactaaagggggcttcctggcactgacaagatggagagaaaggtagccaggtttagggtgttcacagtctctaaagctatgctgggattctcacatagaagcccttggtatcgagtcatttttggatgtgataacctaaggtgtcccctttggtccatcaaagttataactgagtgcggtacccggattttcagttgctgccataaagtcagtttattatcttcttgcaccagtagggcagtggcagttagcacattgaaacaagtaggccatccaagcaccacagattctagttgcctggacaagtatgccaccaggcgatgccaagatcctatgacttgagtcaggactcctatggccatttcttttcactcatggacatacaaaaagaaaggcttagttaggtctggcagtcccaagtttggggtctgaattaacgcttctttgattgtttttaaggccttctcctaattggcctcccagaggaggggctccatttctccccactttgtggcttcatataatggcttaggcatgagcaagaaatttgggatccagatgcagcagaaccctgctgctcctaggaactgtcttatttgatgccagatagttggagtgggaagcgcacaaacagctgagactccagtggcacctacaatagtttcacagttcttggatagtggccttataggtcaggtcactaccaagtgttcagtcctggtgtctaccataaggtccatcagctggccttcaactagtaatatgaccatacgttcctaggggcccaaagagaaggagcccggtctgtctgagacctcatattcttcagcccctgccatcctgatcaggtcagtgtctggttcctcacagggtatggtagcccttggccagtggttttttcataccgtggccttaaccattctccacgttattattctctggacattcatccttccagtgtcttttccttttgcatcacgcacattgatttctctttagccttggccggctctcgaatccctttccagaccagcctcttccatgaccgcatccatgaccccttgcaaagccagcttctcttcctgtgaggtctgccgctggctaatcagcctttttcccaagcctccgttcagcctccttctttgccttctgatctcagttaatgtacaccttgatagccacttcaataagctgagtagcattcatgcctgcaaagccttctaacttcagcaatttccacttgatatctccctggtctgccctacgaatgccatattcaccacgcgctgattttcagcagcctcagggttaaatggagtgtataactggaatgcctcacagagtcataaaactgtatgggcctctcatctgcacatagtagcagctctgagattttccccacattgattgcctttttcctgtcatctcttaacccttgcaggattgtctcttgttagctctgtgggtgctgaaactgggttgcatcatttggatcccagtggtgatcctcttcaagaaattggccctgtgtatatgcctgggcatcaactgtgcctgcaggtgcattggcttctggccaatggagggctgcctgggttactctctggcgctcctcagtgttaaatagcatcaggttgagctgtttcagtctggcccagttggatggtgcgttaggaagataaactgcattacatctataagggcctagggcttctctgtgtcagagggagtatgatgctaccagtttaggagaccagtggttcaaaaaaactggtaaatgaaggtttgttctcctccctggacgtggccatgctcattataataggtgggtcctcttctttccctgagaggcatttgcataactcaggtgcagccagaccagagatggcctgcctgatgttctgggccttctcctttaacttcctgaagctccaattcctccctctccggtgagactggggacatgtatccatttgagcttgactcctcaggggaagttagccttggtaaagggtggtagattggaacacgtgaggtgactgcaaaactggcttttcttgcctttcctgtgactttgcctttgtctctttaccttcctatgccgttgatttttctttcactttgggtttggcttgagctacaagcattttacagtatgctgccagacaggtttgcagccatgctggttgaatttgaattctatttagccataaatcgatataggagaatttgtctggatgccctgactgtcctccaaccgtggtcatcaccttaaatacatggccaattgtttccctatctatagtgccttcagccagccagccaacactaaaagagagtcatactatttcacagagagttcttaacatctgaggggttaccttgactccataattcctcacatagcctttcttaaaattttttaacgtgcattctaatggggtgggtctcaataattttcttcctatttcctcccagttatggcacagcacacttgctcagacttttgcttcagaccgaatcccttctgaacttgggcatccatttctccatttgtcaatccccaggatttttaccaggtctctgaggcagtgatagaatcaggtgaacatctcaatgtgagatgcacgtagaattgtaaacttccttccttctttctcactctagagggaaaacaaactacgtgcaattgctttgaatgactttgggtaaagtcacaggggagctgcctgcttttctgaatgagccagatagtctggggtttaaacgccctctagaggtttctcattggttactttgtttacaccttacggaaatgaagtagtggcccgcaaccagtttgaatggttgcgggaggggaccaaacagaggtactttccctttttcatctgcaatgcagtggaaagcgggaattggtggcatgatttgcaaagggagtaacctctgatccttttgttacttgattgtggagaggtgggattttccttttgattgagttctaggaagtgagtgtgaatcatccttaggttccctgcctccagatcctgttctgcctcactccttcagatctggggcatccctctccttgccagcctgcccctccccttggctcccaggaggctcctcaaggctgtctttgatgactcaggagaacctgaagtggggaaggcagccaggtcttgtttaaattcttacaatatattttaagacaaaagtctggcatatcttgtcagagttttctacatagattacctgtcacctgtgaattaagataattgtactaatttctttcttatccagaagcccttttatttctttctctttttttaatttcactggccaaaacatccagtgaggtattgcttctcacaagatggcattagctgtggggtctgtccacagaccctgacccaaacgacctatgaataactcgtacgctgagacactgatactctgttttgccagtcctgctgagtgtccgaccgcctgcacaccaagagaggtttgtcactgtggctggccctgagcagcttgcactccaggcatttattttgtatagaattaacaacagaagctttgaataaacacacttatggataattaacatggttgattgtagttctactaacgattaaaactcaggtaccatggtttaaagtaaattccattagggggcaatatctttggtcaatctcaccctgagagggccatctggctcaaagattagttagtggaggtagggtaatcagacttaaccggggaagcctctattgtccctagtatttaccctatgacctaatgctctaaggtaagaaccagctgccttcagcctgtttaattattacaagctatgtaacattttggccttccaaaaaggtttgtaaactattccctgttgctttccctaatgtttccctttaatatttctggcaccattctgagtgaatcccaacatttccccgtytttgttttcggtatcatgtctttttgatttcagattgcagawatgtacagccataggattgtcaggtgaggtggtcactgctcttattccggctttgcatcctagaattagcaaataatacaagacaattatgagtacaattagcaacatttgtttccagtctaagagtgaccggtagtgttacctggcatcttagtttggtgagtactgttgctaaggaaccccactgagggtatgttaactccttccagccaagcagttatgtcattagaagctggaaagggagtatttgtttaagtaaaagggctgacaaaaggcagattcagaagatgagcttaatagagtgtagcaggtataggtaataggcaaagtgagagaattaaaaatgagtaaattatttggcttagccttctgcttccttagcataatgtgtgaggcctgtgctgttcctggaagccacattgttgaggctgtgggtccttagggtttttcctaggctggcttgagttttttttctttccatccttggatgaggatacagtctccaggctggtgctggtgtactggaaattctaggggtggtacctgtgctaagagatctttataatctttaaagagcaggatagtacttcaagaaaaacttgtgcttcattttaatgtctagtttacagaaaaaaactggatacttttttaaatttagccaatatgtttacatatagaattttttacaattaacattttacaacttgcttagactttcaaaacaaaaattatacatttcctgcatgaatcccttttataacattcttcacgactttcacagacaatttttgacatgccttaactttttaactctgttttgtaatcttccttactaagggtgcattcttatattaataacttttwaaatatttccttttccttcttcccactttctttccttagtctttctttttgtgtctctttctgatctgtttcttctagtttctttttaaatcattctttccctttatttctctttctaggggtggacatatgcacacattctttctcatgttaataatttatttggaccacaccatttattactgttcacatttttccataaaactgctggttttatgccttgagaggttttagcaaagtgtttttctacagctgattgaaatttgtcatctgaatttagaaaattatgggtaaacaaggtttgtgccagtagtgttgcagggtctttacctatattcccctttttctgattttttactattgcttgacctttggagttatatgggatgcctgtggaatgttgaatattccacgtgtgataaaattgttgaaattgtcagctggcataagctggtccattatcagctttaatctttgtgggctatcctataaatgcaaaagttaaaagatgtttaatgacatcttgagtagactctrcaggcagagcatgtgcattaattaaatgagtgttattatcaatggatacacacacatatcttagttttccaaatttaggcatgtgtgtaatatgtttgccataactgcttaggttccaatcctctagggttaacacttgttgaaggaggggacgtgcctgtgagctggcaatctggacattgtaggataattgttktagccagcctctgagtaagttgaaattgtttagataagtttctccaattttggtggaaaaattgatgcgattgggtggctaggcctagcagtgatgtcatcacctgaaggtctgctcgttcattgacataagccaatgggccaggcagtgagctgtgggcttgaatatgtgtaataaaaacaggatgtgtacgttggtccagcaattgccgaagtcagaaaaagagtacacagagtgtgcaccagagtaaacttaattgaggctgtaaaagttctttaacaaatacacagagtaacctgagctctttgagtgccagtaaacctagatccagtgattggattatgtggtctctattagactactgctcttccatgtttaccagacccatcagtaaacagtgttaaagcatttggtatgggggattgcaatacggctttgaattgcattttacttaaaggaattttgatgatatcgagtcataacttagcaattgactgcattaatcattaagatggcaagctgaaataaataacgtgaagtttaaaaagaaaatctgaaagcatctttagaagcagagacttaaattatatattttaaccatgtgcttaaagccacaggcagaatagcttaaatgttgcaatggagttctcaggctgaccaagtttatggactttaatctggaaaacagtcttgaaaacagtgactcactaactggggaacttaatttgggactcttttagcaagtatgaatcaaagactatctgtaatcagtgggttaagacagtcattcatgcatgttttggctacacttacatataactcttcttcaccttttgagaagggcacaatattttcaccttttaattgaacaaatatcatttaattaggtttaaagttctcctctaagggtaatgtgtggttttacatgcctaacttttaattattctttaattcatgggccctccttaatctctctcccttcagaggctactgttttacttaaactggatttgtagagctacctcgggggtaggagagagataacagcagtggctattatctgaaaagaggtttttcaaattcttacattttacttaaattttagcagagaattataatttgggatgtcacttgtaaacaaggagcacaggaaattttgctgtgggctgtctgcaaagctagagagtcaggcaggtgcgtcctggggctttggctgctttgcacttgtaaaagcgctgctttttgcctgtgctggctccctcccgcaggcacccattggctgttcctggccagggtggaccccagcctccccttgggctgactttgttgtatgtgcctctcgcccctcccctgcaggctagctccaatggtggcttagctcttcgttgcctctgctgccatgtgggcggagttttagttttttctyactgcttgcttggcaatgcagctctagcttctaatgcccttttttaaccctttaggtatctgatcgctttgccaattttgcgttactgggcaggctaagagatcttcttttaattcagcctgcttaagacgggaactgataactgtagtgtatcctctgccttttttcttatctattggaggaagctcargtaagacctccttttcctctctgttaattccgcctggtgattagggcccagggaagacgaggtgataaggcaggtaatgtttcctcttcctgcccctttttaggcttttccgtgtgtgactgagccagggctgctctagttaaagcccataacgttaaagctgttactgggacttgctgcctttgcaactgatgtttttaagatctctccccacttgtttcccggagctctatgtctagcgttccttcttctgggaaccatggactttgggatttaacagtttgcattacagcaatttgtctagcatgcatgattaggtgccttaattgagcctgtgaaactgaagctccactagccttaagcagctgttgtaatacttttatataatgtttctgctgtgctaataactgttgtcccatgatgaaatctcagcttgaaccaactttccccagaacttggtaaccttgagtgggcaccaatgacttactagttactcactgacttgaccacgcggtttttcttcacctttgtttccygggggcccgtcgcattcctcaggcttcctttgcagctttcctcatgaaagcggtccttacacttccttcawagcttgccttacaaggggctccaactgcggaaggtctgtttctgcagacccctgactgtcctcacacagctctcctcacatggggcaccaattgaggtattgcttctcacaacagggcagtagctacctgtgtctgcccgcagaccctgacccaaacgacggatgaataaaatgtacactgacacacagataatctgttttgccagtcmtgctgagtgtctgaccgcctgtaaaccaaaagaggtttgtcactgcagcttgccctgagtagctcagactctaggagtttatttagtgtagaattaacaacagaagatttgagtaaacacacttgtggataattaacatggttaagagagtagttctaggaatgattaaaactcaggtaccctggtttaaagtaaataccattagggggcaatatccttggtcaaactacccccaaragggccatctgtctcaaaggttacttaatggaggtagggtaaacagatctaactggggaagcctgtgttgtccctagtatttaccytatgacctaatgctctaaggtaagaaatggctgccttcagcctgttcaattattacaagctttataacctttcaacctttcaaaaaggtttgtgactattccctataactttccctaatattttcctttaatacttctgccaccatcctgtgtgaatcccaacaatccagcacaatggtgaatagaatctgccagagcagacattcttgacttttttctagtcttgggaatgcattcagtcctatcccattaagtatgatgttacctctaagtttttcataagtgttcttcatgagatttaagaagttcccttttattcctaggttgctgatattcttattagaaatagatatcagctttaccaaactcttcttctatgtctattgagatgattctatgtatatatagaaattttaattattctaattggcttattacagtgatataattttcaaaagttaaaccaaccttgcataactggtatttacctgttagttcttgcatttatctttatattggcctgcagttttctttttttgtaatgtttcacccgtatattatagagctaatttttccctattgctgagccaaacttctttttggtattgtactcaatgccccccaaattatgatgtttttttctaggtctgacaggaacagcaatattcccagctctgtaagacctccagggattgttccttctactctttttagttagctggtttctcagacctaggtaatttcctcacatgcatgtgcagatcactactcatctaaagactcatggggaccctctctgtacagtcctctcctgcccttcgaaagctaaactcattggcttccctgaactcatttccttttcctcaactcagttgcaaatgagctttgcctggattctttcacctgcatcatggcctagagcctctcttcaggcagtaagctggggcagtcttagagtctggatcatttctttgtgtttctcaaggatcactgtccttctttgactaatgctcaatgtcttggaagccattttgaatattttgtttatttctccaggtttttcaggcaggagtgcaaattagttctctgttattccatggtggccagagtagaagctcaggatgctgctttaaaaaaaaatttttttccaaagtctttagttttaattagtggaaataatgkgctataaagggyttactttatcttggctgcccctattactatcaaatatataagtataaacataccagaaggtttcttaggcagattaagggcaacttcaaaatctcacaaggaacataatgtgaaataatgaatcgttataagtatttcctttacaatgaggaagaatacaggagtgctcacaattactgcctttatttagctggtaaataaaatttattttagccaatgcagtgtgakaagaaaaattagtaaaagataatatttgaggattgaaaagaagggaacaaagcatattcatgaaatatccacagataatatcattacctatttttgaaactaaaaagatttatagataaaatattagaatgagtttaaagtagtaaacgggctaggtttaagaatgatatttacaaaacattggatttagcttagtcaacaatatcagaaaatgtaataccccccaaattrttttataatgcctagaaaaatattatttacctagaaataaatgtaaaaatgatttgttaaccttttatggagaaaattattttgttgaagacacaaaaatgtgacataagtcaatgacaaggtatactaatgagtaggaaatctcaaaattaagacagtagttggtgaatatacagaaaaatataccattggaacagaacagagagagtagagacagactcacgaattataagaaaatatctttgtattagtttgtgctatggtgtgaatctttgcatcccccacaattcatatgtttaaatcctaatctccatggtgatggcattaagagatgggtctttgttgaatgattagatcatgagggctctacattatgtattttgttagaaaagttcagactagacagactattaggggtaataatgtaccacagactatatggcctacacaactgaaatgcattatctcatcgttctggaggttctaagtccaaggtcaagatgtcagcagagttggaacctgttggtgctgtgagggaaagatctgttccaggactctctccttgatttgtagttggccatgtttttcctatgggtctttgcgtcatcttccctctgtgtctgtctctatgtctaaattttccccttttctaaggatatcaggggtattggattaggggcccatcctactgcagtgtgatcacattttaactaagtttatcaagaagaaatgtatatcccgataaggtcacattttgaggtactaggggttaggactataacatgtgaattatgaggggacacagttcaacccataacaatcttatgttgcaaacctggcagtacagatcagtggagaaaaaatgaacaattcagtcagcatcactggagtaatttcttatctatatgcaaaaaatagaaagtgatacctacttcaagctatatacaaaaaattattccagattacatacttgaatggtaaaagcaaacatttgcaatttttagaaaacaacagaatacatcctttgaaagatgttgtaatgacataaaaagattaataaacttgacaacaataaaatgaacaactcctgttctttatgacacctgagaataaaaaatcaagaagaaactcagaatacatgtttaacacgtatgatgaataagcaatttatgtctacaatattaaattacttctagaattaatactaaaaagaaaaataatccagtagaaaaatttgcaaaacactttggaaggcagaggcaggcaaatcaggaggtcaggtgttccagaccagactgtccaatatggtgaaatcccatctctagtaaaacagtacaaaaattagccaggcgtggtggcatgcacctgtagtcctagctacttgggaggctgaggtgggaaaatcacttgaacccgggatgtggaggttgcagtgaaccgagatcacaccactgcactccagcctaggggacagaagagaccccttctcaaaaaaaaaaaaaaaaaaaaaaaagacataaacattttagagcctgaagcatgaaaaaggaaaaagggttcaattccattagtaattagaaaactactgttgaaaccctcaataagatgccctattacacccacagaattggcaaacattaaaatatggataataccaagcttcaagctttgatraagacatagaataatgagaactctcatttctcactggttgaggtgcaaggtggtacaaccattttgtaaaataatagggcaatatctattataataagggagattatgcattttcttcttcttgttctactattgcctcatgttttcaaatatttattgctcaaatctatttctgaagttgagcatttccacttttacatctacacttgagagacacccctgcatatgtgcaccaggaaacatattcaaagatattcatagaaaaacttgccactgcttttagcagaaaacccctgaatgtgcataagcagttgattcttcagtgaattctctctaactgtaaaagtggatagagaatttcatcaactacaatgaacctcaaaaaagtagtgcaaatcacagaagaacaaattcagctggatgtgtttatataaaatcaaaccaagcaaaacaaaagtttactatttatacctttactacatatatatgtctctaaataagtgtaagacactactaattttaaaacaaatttagacttagtggttgtccttgagaatgagaaagggagataagatgaaggagggacacactgtatgcctctaatgatttgtagtgtgctattttttaagttgggaaagagatacatggatgtttattatatgaaatattggctgtcataaattgcttttgaatgtagaatatgtttcatagttttttaaaaacacagtgtataagaggtaaaggaagaacctgagaagtattcacaggatactagcttgggtagtcaaatggataatgacaccattgtcagattcagaaacacaggaagaggggcacaattaaattttatgactctggttttgaaggggttaagagtgaaatgcctctgacatatccaagagtagatgtcaaagaggcaacaaaatattaatatctggaggttagatgagaggtcagtgctgcggagatagatttgagcaataaatatttgaaaacatgaggtgacgggagagcatcaagataaaaaggaaatcactattcctataatctcagctcattccattgtacctacctactaaatgatccaagcccagctgtccytcctgattttactccctccaggcttattcctctatttatatagattagatccaatacttcaggcttcacaatgatttccttctgagttatgaatatgtattatttttctgattatttttagtcatctatctgggttgtcttakagctcaccaagctattcaatgacaattattttaaattcattatgagacagttcataaactattatttttttaggttcagctattggttattttttttttcctttggtggtatcatttttctctgattgttcttgatcttgatttttaggcagtgcattagtgtctgcacatttgaaaaacaagaaacttattctagttcttgcataccggctttatctggaaaaaccctttcctagtcatccagcaactctttgtagggtgtctagtgtggtctgcaggtgaacttgttgccaaagtcctcaggcaggctggcctggtgcctgtgttagcagatggtaggcctgtttcctgggtctgtagagttgggcctgaagcctggatcaactggggtggatcttttcattgggtatgtggggatgaacgtaaagccaatttctataagggcaggtacagagsctgttaacagtaggtgctggactgagcatgggtccacaggggctaacatggctctgaggcgtgcattgagcctgtgtctgcaggggctggccagattttggaatgagcatagtgtctgagtctgctgggataagcctggcatctgagtccatggggactggcctggtactggtgcaggactggagccggaatctggagaaatgggcctgggatcttggtagacgggggcagacctggagcctgagtcttcagagatggtcctagagactttgtccatgatggccagcctagcaacagggtctaatgaagtcggcctgtaccctgggtctgctagagcacagctgggccctgagtttgttggatgctgggttacaaaaaccagcctggagtctgatgctggcctagggctgtggtgagatggggccagtctaaagtttgagaccataggtgctagactggtgcttgtagccacaggggtgggccaagaattgtggaatggcctggaggctggttgtgtgagatctgtcctagaaccaacatattcagaagtgggcatggacactagggccacaaagggtggcttgggtcctagggctgtaggaactggactggaacctaagtccacagaggcagtactmgrtactgggtctgtaggcacctgcccaatactggagtcaactgtgatgggcctggaccctgggtctgctrgaggatgggaccataggaactggcctggagagtggggtggcagaaactggcttaggcctcgggaggcctggagcctgggtctgcagatgcttgccagatacctgactaaggcctagggctagggctgccaacctggaaatggggtgggcctgaatcctggattggtgtgagccaatctagttctgggccggtctggaacctagggtggacttggagtctgcgaccacaggggctagccttgtgctaggcagtcctcgagcctgtatccacaggggccagattaggggttggatatatggacactggcatggtgactagagttgcaggagctagcctggtcctggggctggcttgaaacctggagttgtcgaggccggccttgttctgggagcagtctggagcctggagtcactggggctggcctggtcccaaagactgtctgacatccaaggcactggggtagacctggcatgaggatatacccagaaaccaagtccaccagrcaagcctggagcctgggctgtgtgatctggtctggcttagtgtgcaggtactagcctggagtttcgggcaatagtcgcatacccattactggattttactgaagcaggctctgcgttggagtccaaggcaaagttcagtgctcacttcacttttcttcttcgacacagagattgcctctctctgtgccctgctgcctggtgttgtgggaggggtgacacaggaaatgaaaaattgttcttcctatgctcttcaattaatcttttcttatttctctgctacacaacatttctgtaacctttcacctggttttcttagctcttctgaaggtattttcatgcatagatagttgtttaaattgatgtttctgtgtgaggataaatgctagaaagtcccattctgacattttgctgatgtccagtttcacggcatccaatcagatttctatataacgattgtcaaagtggctcagcagcatcagagacaggtctcctgctaatttggaaagaaagattgcagatcttatgttaaatgatcttatcaaacacacacatatatacacacaataataataataaatagagctgtcaaaactttaggaggtgatgaatatgtttatggcttttgttgttgtgatagtttcatgagtatgtatgtattcacctctatattcatcaaggtttatatattaaacacatacagctttttgtatgtcaattatacctccataaaktagttctacaaaaaaataaataaacaccatagaggaaaaatacttttggcctctttctccatgaagtatgacttctatttcaggtttctggtggttactgaacttccagattttctgatgataagtataataagagaaataatatgttaggctagaaaagacaaaaatgcaggatttgaggatgaatcaatcaaattttttcataacataataggacttattgttcaacatattcaagccagtaccaggctagagtgagagaaagtttccagatcaaatatttgtgtaaactaattcaactaaagtctcaagaggaagagattcrtgatgagatatctggagtcacaatgtgcaaaattcatcacaaagtggaaaccagcatcttacaatacaaagaacaatggcttgggattctgagcatctgggttctggtcttggttttgcacatgcaatcatgtgtccacttcccaggacttagtttcttgaaactagacaatctctactaaacctcctatctgattttcctccctttcaggaagttaggcaggtgctcagatcagctttttggtcacaaaggatgaaggaagaaggcaggtgtctttcttaaccacagttttgggacatggctttagagaatgcattagcagggactaagcaaataatgaaagctgaatttggggtagaaaaatggggaacaggagaygaaagaatcagaaagaaaatattaaggagcaacaaagagtcccctattgatttgtagtatagccaaagttttgtttttctcttccttagactcttagaggactagaagacatcagagagytttaaaatgttctaggatgccaaagccaagaaagcatgtcctgtggatccgacaccttctcagttccctgatctagctaaaaccaaataccacttgctgatttctccggaggcactgaaacctcatcaccaacccagaacagtttagcatgacttgttctctccatgaagtccctaaacatcccccttcttcctctctaaaagcttcaagaatccactttcatgtcaagtttttctacagaggcagattgttgtttatatcaaactccagaaaccctcatccttttctgatatttatttaagttggtgctgtcagtcttttctaccataaagaacctgtgtttacttggctcttctgtgtcttgccaccagccaccagtcagttaaaacagctttcttttgctacagagaggtgcagccacatctaaagccaccagcagtgcaaggtcctctgactgcwttaacaacccctccctgagtgtccagatatgaagaatctgctcaatcaccaaagctcctgaattaagagttaggatgctcctttggaccttcaggaggaacttcattaggaattctgagatagagcaagcattgctggggaaccacaggtcccagtgtyctcctgtcatctcagaagccagtaaagaaaccttcttccctagaaagacttctggagagaaaaaaattccccaagatttgagagcatgagagtctcatggtgaggtccctggtgaacagaaatcagaaaagtactagtacacagaagagatgtacaagcatctagtcactgcctcaaagtaactttgaatttattatgacttagattgagatagagtgattctttgactgttcggtccgtgcctgaaacaaacatgattaatatccataatcttattaattttattatccctaggaggcaaagtctccaaagttttccaaatgatcttgcaaaggcaactctcctcagattccctaggaagttttcagattttatgaataggtgccaacagctatcagatgtcttccaacgatggctgctgcatcccagtttcacattgctaagggttaawgaaggacattgatatgaaagaagcatcccagagacccttgacacattgtgagagtacacagagggtggggctccatcaacctcccacagacactcagccatactattcccattccctgccatgagcaagagtttcagggcctcacaggggttcaaaggtggccaaatcattgccactctttgtagtatgaagtacaccaacacgtaaaggtaggctaaacattgataatataatagctttaaatgtgtataaatgtatgcttacaacctcaaaaatgccatgcaatattattgttctacttacaagatcagtgcaggaattataaagcattaattcagagtggactcttggcagtgtgtaatttatggtgcatgtgttctccattctgtctgtgtttctgtaccattgggtgataacactagaatctcaaatttgggaacttttttgaaagtggggccatgcctaaatggtatcctagttgtctcttccaccatgaccccatgatggacctgcaaagtcccaaagatggaagaacattcaggggtagccagctggagagacctagaatcagagatctctcacacagcctgaaaagcccaaagcagatgagcataacctcagcacctgtgaaaccagaattcattgcttccattcagagatcccatgttcatgtcagaatccaagctgccacgagtgtttcatgaagtcacttatgactaatactgagtacaatgggactgatatcagaactaagctaggcccrgagagccctgaggttgtgacacataaggctaaacctttgagttttgatccacagagtagatacatcagagaagtggacttggagaatcccctgctggagtcctagagagtaaccactctgtcagatagcatgtgtttctgagaggaaagcacaggggtctagttccagccgtatccctctgcaccccatatgcacgtgctgagttctagagagactccagagctggtctgaaaggctgatgcaaaggagtctgctctggaactgaagtgttataagaaactggcaagctcagcagccctacagatrggtgaggagcccagagatgggagaggaagctattctcctggccaaggtcctgattcagtttgccagaatcataggcagacttgaggccgactggagctagcactggcagtggaattgaaacctcccctgtagtcccatagagaattttttttgtataaacatagaaattgacccttctgatcttaatgcttgaaacttttatttgttttatatgaatttcatccttagtaaaggacccctacgtccctcaaaaagtatcaaagaattgaaactcaccagatgatcccatccagacaatgggacaccagacccctcataaattatgattgcttccttaggtckcctgagttcctgtttttctacacattgttacatttcttcactgctatgaaaactcataattttagttgatcagcaagayggatttgagaccgagcttgcatctcctctgctacagcatccaactcagccttcttccttggcaattggttatattgattggctttctgtgtggtgagctgcaggacctagaccacacccctggtgtttcagtaacagcttttggtttcccgaccaggaacactttggctcagytgccatgggccaggagtctcacagaactactaagcagctgcttacccaattttggctggagagataagtaccctctggggccaccacagctggccccaaccatggtcctgattgccttggaagaactgcctttggaatttcacatcggcatccagataggtgactgtcctttgtgggcccagacagaaagatctgctcctctcagtttgggaaatttttaaaggaatttccacttgcgggttgaataagcccaactgacgaagagaggaaaataccctgactgtttcagtatggacattcttgggggcttgtttgtcattgtgtgtgtgtccaggcaagtgagtgtcttttgtgggtactagatagtgggatcagctcctctccatttgagaaattctgaaggaattttgatttgcaggttgattgagcccaaccaatggagagaggaatcaccccaactgtttcagtttgtagacttttggggcttgtttgatgctgcaacagttggattgttttagtgattgtttgcaagtgtctgatatagtcatcagaaatcagaatttaataaactgacactcttttgtaacactgtttgaccccagtatagtttggaatctggtatttgcccttgaatgggaaagtgggttggagttccatgtatccaggcttttgtgctgctgctgttgggccaagttagtatgtgatattctcctgtggtgctgtttgaccccagtgttctttggagtctggagaactttggactttaaaaattaaactgccacggaaactgttttactgaaaattttggttcacagccttcactggattacctatcaaggctaacaaagttcagccatgtgaacatgtttgcagactgatgagtttctatttcaatagctagagttccaaggtaaaagctattggatctttgggtgtatgtatgtctagatgtgtctttgggtgtatgtatgtctagatgtgttaatgtgtaggcatatgtattacgttaaatgttgtgactacccaattggattataaataaaagagtgctcatagattaagtaaacaagtccaaagtatttttcatgttcatgctacttaagtaaatctttagcaagctagcattaaaattttgtaaaataaaactagaaatgtcatcatagttgtcagcatacatttttgtctgggttttgtatttgtttctgctagatattttgaggtatgagagtttggcacagaagtttataaagttgtcaccaggagttggagataagcctgggaaacagagaccccctcccccatctctataaaataaaaattaaacaattagccaagcacagtgattcatgcytgtagttccagctactcaggagactgagattggaggattgcttgagcctgaatgatcaaggctkcagtgagtcttgattcagccactgcactccaacctaggtgaaagagcgagaccctgtcaaaaagacaaatagaggcagagaatgacaatggggcacagaagcattgcagggagactaggggaggagtagtaattttttttattattattacactttaagttttagggtacatgtgcacaatgtgcaggttagttacatatgtatacatgtgccatgctggtgtgctgcacccattaactcgtcatttagcattaggtatatctcctaatgctatccctcccccctccccccaccccacaacagtccccagagtgtgatgttccccttcctgtgtccacgtgttctcattgttcaattcccatctatgagtgagaacatgcggtgtttggttttttgtccttgtgatagtttactgagaatgatgatttctagtttcatccatgtccctacaaaggacatgaactcgtcattttttatggctgcatagtattccatggtgtatatatgtgccacattttcttaatccagtctatcatttctggacatttgggttggttccaagtctttgctattgtgaatagtgccgcaataaacatacgtgtgcatgtgtctttatagcagcatgatttatagccatcccattactgggtatatacccaaaggggaggagtagtaatttttaataggatggccaaaggaggccttattgagcaggtggcttttaggtgaagacttaaagaaggtaatagagtttttataggtctaataagaaaacagaatgcaggcagaagaaaaagaacagccaagtgcctgaagcagagaggccaaagagagtgaggtctaggacctgactggacagatgtcagggaggtgactggagtctaacttagagaactgttataaacaatttgtacctctttctctaaatgagattgggagttgctgcaggagttgcacaaagacatgacaaaatctggcttttgttttaaaaggagcatcctcatttgttattgacggaagactaaaggcattctccatccagaaaagactgctaagaactgtgaagyatataaaagtttaccctacttggggcaatgtttcatgaatgctgacagataacacaagctttctgggtcaaagacagagttttatgactcattcaacagggagaatgatttttgtgtttgtgtcagtcatccttgctccacaagtcctacagaggaaatacagaaaggcagattaatgttgcaagtgcaacagatgtgtgttgaagccaaggaaccctgaatttaggtcacctggatgttttataatgaactgcaagcaaacctgtctgaactttgctccagagggggacattatctttcttatactgatcagtaagcagacctaccctctgcttcagaagaaagcaatatctctagcttccaagctgtcctctttagaaacatccttgaaaagatagtcaggagaaaaggctgtcaatgtctctgctcataagacatacagaaatgtgagaggccatgaagaattttctcccagccagaattagcaggatgtcataatggattggatgtaaagtgggaggggaaaagatacttaagaataactccaagaatttttctttgaacaggtgaagaaatggagttgccatcaactaagttgagaaagactacaggtgaagtaggctgggtggagagggtggataagaagattgatttgagacataatgagtttgagatggctattggaaggaatccaagagatgtcaaacaggccgttagatacatatgccttgagtttggaaaaaatttgagtagtaatttaaatgtattagtcattggcaggtagattgattttaaagctatgggaccagatgggatcaccgggaactctgaagtgatccaaaattaagaaactggggaggaaagaagggtccacagakgagactgagaaaaagtagtcagtaaagttaaagaaaaaacaagagagtgtgttgtcttggaaaccaagtccattaaaggatgatctattaagatgagaagcaataattgaccactggatttaataacacagagatccctgatggttttaaaaagtgtttcagtmgaatggtagcagcaaaaacccaattagatgaggttaggagggggattggagatagcatgtatagacaatcctttcaataaattttgctacamacygttgaaacaaactaattacagcctgagaaggactctgtacttyttcatttgagtccttgtgggtaaactgtaacgtagcttaatcatcagacaaaattgaaaacctaatttagtagtgtgcacctgtaacaatactccagtgttggccaatcccagcagccatacttcaactactcatagactgctgaatgttcaaactgtgttcaaataaggcaagcgcccagttgtaaccaatctctttgtttctgtacctgatttctggttcctgtacatcactttaccttttttgtctataaattcattttgaccacgaggcacccccggagcctcggtgaatctgctgtgattttgtaggctgccggattcacaaattgtttgttgcttaatgaaactcctttaagtttaattcagctgaagtttttcttttatcagatggtgtcacaagaaggatctgaagtggagcttctagtatccccaggagcgcgaagtgaacacggaaggtacctgcaggatccaattgtgtccattgatctctcagagtggctgaggataataggtaagctccctctcgcattttggagcttcacacgttggtgttttgagctctctgagttgcttggagcaaatttctgatccaaactgggtttggagtcacaacaggaaacagactgggtctaggaacagatttgatcttggaattaactggcctggatccagttagaggcctcttacatctcactgggtcagaaaggaactggtagtaagcagtaatgttgcaggagttataaaatttggcttttgaaaattcacagggatttttgtgttctacccctttgtttcttttcttttcttttttttttttgtgcgcctaggtaggaaaaaaatcactggctaagttcatcaagagaacctaagaataaagacaatattttagataaaaatgggatccttaatttctgtaaaactgagttccttctggcttatacattaggactgtataccaagtcttacagaaatggcaaaacattactaaagatacttagagtggaacattccaaatgaacaacaatgccaatgcatttaaacaacaatgccaagtacatttataaatgagggctctcagtaaagtctctttgactaaaaacagttttggcactattggatgtcaactgctattctttttggaataatctgccttgcactctttgttgactgctgtgggtgacaggatgaggcatgtacagaattgtggtgaatggggagctttttccttctccctacaaataaagaaacttgatagctgatgggactgtggggaaaaaagaaaaaaatatatagcatttattctgttttcataattctcatatttaactatggttccattgccttccatgtttttttcaatcttgcataaaaataaaaacatctcaatggtacaaactaaaattctcaaataagaaataaatcacacatactttcaycacccaaaaacaattttcatgtttatttattcccttcaagtccttgtccacatgcaaacataatttgggtacatatgtaaaagttatatattttgatatttttacccattattcattataattgcttttctgtagtcttcacagtgaccactgactgtgtgctactcatatttacagactgtcattcacaaatttataatttctctttagtggacattaaacttattttccatatattatgaaaaattattttagttaaggaatgaaattctgatacataatacaacagatgtgaaccttgaaaacattatgctaagtgaaataagccagacccaaatggaccaatatcatcggattccatgatatatgaagtacccagaataggcaaattcctagagaaataaagtaaaagttaytttatatacatatataaaatatatatattatatataggggtatatatatatatatacccctagccaggggctagggagagagggaatgagtaattgtgatttcatgggtatagttgccatttaggatgacaaaaaggctctggaaatggataagcaccatgaatgtatacaataccgctgcattgtacgcttaaaaatggttaaacggttagttttgtgttatgtgtcctttacaacgatttttttaaagaaggtggggaggggtctccccaggtttttagcagcttcctgatttagaaaagaaatgttgatgktaggaatacaggtagagaacacttttatttgggtagatgttagaagctgaggccagggtggggtcacaagagcaatattaagtatgaggagaggccctcaacaaaggtcattgcaaggggatggagtagggaatgcacaggaggggtattttggacaaakattggcagctgataggtgtgggkattgttctcatgtatcagcccaggatataatgttcccagggcaaatggaacacaagtttttttgcggggagtgatatagcatggtagatcttgaattaaaacttttaaaatcttgaccmaaagctcaaaggagaagacmatagtgaaacacatgggtatgggcaattttagttaaatcaggtgagaaacagagcaaagaaagcacttggagatggggggaagaaaaagaccattttttttttgacagctacaagaacagcagagtcagacaggggataggctcatgtcagagatccagttttatttactaaaagttccttgggtattcaaacattctgaaattatgagatcttgcaaaaggatgcctttgtttaaacattgcttcatctagctacagaacatagtttaactttgaggcctttgaccccagacaagataaaatatgtttcaccttgcctattacttaacacatatttgttaactattttaacttcatggataaaaaatttcaaaaatctgtgttaactgatttgcaaatgattgtttcaaatatctgattcgtgggttccttctcttacattaatttkgtkgtaagttcttcacatttttaattatttttacatcattgaatataattgctaaatctctatatgacatgttgattaatatgaagtcaattaaaaaaactaacatatattaaaacttgttcttactttattccaggcataatgctatgcattttatacatattacattgtgtaatctcaatcctttggaaaacatgcattctaatttccagttccaaagttgtgagaaaacactttgaggttctgattggttaagcaacttaacaaagaagtatgagatggaactaaaatttgaaatcagcctaagctttgaacctatcagttgtgatgatcaccttctccaagttattgttaaattattggcacatttctaagaattctgaatgatatttcaacaaaagtttacagatatgtgttaaaatttttctatctgtttttaatttttgtaatgaaactgggataagttccaaaatggccgtaggtttgaaatatttggccctgagaaactaaagaaaatctatgcctactcctgctccaagttttttagtcatacctgttcttagagggctgatattttctrttgcagatgaaagaagaattctcaggcatataatgaccaaaatacaggaaaaaacttatgatggtagtggtggagtgttctgttacaggcatttgggaagctcacagaactcttaatattcacttttaattctttccacaagggaggaagggcatgggttttggagmcagtcatatatggtttcaaaatctgactctggcatttatctctaagaacttgagaaatttacttagtccctctgagatttggtgtattcagaatgaatatgatactaacagtacctacatcacgagtgttacttgaatggagatgtataaagtgcattttaaattcatttgtttccttaacattttcccttcatttmttatcttttcagagtttcttcttcaaggtctcaaggtctgaagcatcccacagaatgatcctactgaataactcccataagctgctggccctatacaaatccttggccaggagcatccctgagtccytgaaggtcagggaacagtgggaggtcagggtatgggagtaggggtgttgaggatgagaaaatagcaggcttgtgattctagtccttcctgactgtttgcagagggttggagctgggaaacaggatgggactgggggcacaggctgcatatcaagagctgctgcttctctttgggaagaggcagctaggtccactctgcaggttttgccactcatttggagaggcagtggagcatggtggctacgaacatggtttggagcctgtctgaatggatatgcattccaaggctgccattttctagtcagatggctttgtggatgtttctttccctttctctgactttacgtttggtttttccatcaatgagatgggaataacgttagcacctacckcttaaagttgctatggacactgaataaatctatacaatataaatgctaagagcattgccaagtgcccagctagtacacagtagctctttggtatcacaaggacagtcctacctgtgagttctgcctgcttgctggtaacttcacgtccatcagtatggtcctctccaggaccatactgctcatctcaccatcactgacttggtctcagtaccttctcttaatctccatttttctcttcctcttcacaaccagatcctcatytctggggatctcaacctctcctggtccctttcatccctccttcaggtgtatggctctgtgtatcacatcaatcacgggaaccccttcaacatggaggtgctggtggattcctggcctgaatatcagatggttattatccggcctcaaaagcaggtaggcacacagacagggactggtggagccaggcaggtccacagggcctgaggaactgaccagttcagacaccakggctgcttttatagggtgaaaggaaacgtgagtattttaaaacactccttcagtactgggcaccttgcatgagtgccacgtgttcccacccttcgtgtaaagcataggacycttctgggaaagggggtggaggaggaaagggaggaaaaggacaaggctgacactcacagattaagggccctatgaggtggcaggggtcacctgcaggggctgaaaggaggccaatttacagggaaagttgggtgtctgagatatyagaacagtggcttagaaacagaaaccaaggcataagtctaccagtaaaattacctctcagggccaggcatggtgtcttctacctgtaatcccagcattttgggaggccaaggcaggaggatcacttgagtccaggagtttgagaccagcctgtacaacatagtgagacctcatctctacagaaaataaacaaaattagcagggcatggtggtgcatgtttatactcctagctactcaggaggctgaggtgggaggatggcttgagccccagaaggtcgaggttgcattgagccaagatcacaccactgtactgaagcctgggcaacagagtgagaccctgttgtttttgttttgtttttcaaaaaaaaaagttacttcttaggaaccagggaagggactcataattactgtgtgtcaactgtgtggaagcacttctctcgttagtgaatgttatcatcagaacaatcttatgaagtgagcattaatatctccaatttacagataaggaaacaacattgagaaatattaagtcatgtagcggctggattcctgatgttaaagcattgcccagtctgaattcaagtgcagtggactctaccacttttactagctatataaccataggcacttctgtgagtttcatcatccgttaaaatggggaaaataagaggatcttcttcagaggattacacaaggtttaaatgagatactgtatgttaaacacttagtacatagcacataactgtaaatagtgtttacaataattagccattattggctgaggacacacaaggaataaatgatggagctgaaatggtaatacaaacctaggtgtatttttttcctaaatacttcccctttgtgtttgtgtgtttcatacacatctggttagtaaactgaagcctcattgccagcccaacttcatgtaggtgtaaacgctgagcccccaaataataataagccacaccaggtcaagactagtttgcaaactgggtcaggattcggatgcagaaagtgacaaagtgaccctagcttgaggaacaaaggggtaaaggggatgggaaccaggctgagcctaacaccttcctcagggatgttcttttgatctcctggcttcctgacaatttgggatcaaagattaatgtttagtttatttaatcaatggtccaatttcttcaaagtgtggtatgctagataactgtaggaagtcaaatagttccttttacttcagtaactttgtagttattatatgtattttagcaacgtaactatagcatcaagccataccttcatgtatgcattgctttgaacaaagttagtttttacagtgagtcaataaacaaaaatatgaaaatataaaagtcccacaccacacatataagaccaaamaaaaaacaaaaaggaaagaatgaaatacgctgcaatttacttggaagtgcattcacctagtctgattccatagcataccatgtttctttcagtattgaaagtcaatctgattttgaataagagcttttcagggtgggatgcaggagaatttatctagaaaaaaattaattttttcattgttgatttttaatcacaaagataatctatgttgattatacaagtaaaaaaatccaacatgattttaaaaagttaataacctcttacctcccctcccctcctctcctcctttcctaccccttggttgtaatcagtgtccttgcccatattaatacacagaaggaatcccagcactttgggaggccgaggcaggcggatcacgaggtcaggagatcgagaccacggtgaaaccctgtctctactaaaaatacaaaaaaaaaaaaaaaaaaaaaaaaaaaattagccgggcgtggtggcgggcgcctgtagtcccaactacttgggaggctgaggccggagaatggcgtgaaaccgggaggcggagcttgcagtgagctgagatcccgccgctgcactccagccttgggcgacggagcgagactccgtctaaaaaaaaaaaaacaaaaaaataaacagagggatattcactgatgatctcttttgtcatcactcttaatttgcctttaacatatggacatcactttgggtgaatcaatacagcactaaagtattcgttttaataactgcggcatttcatagagtcaatgcaatgctatttagtcaatcattctcctgctgttgggttcaaactgttcatacttctttgccactacaaacaagcttcaataaacatcttcatatacatatctttatatcctggaaatttttctcagtacaactgatttycaaaaggaatatctgcaagttacagtttatcttattctaagcaggcaatgccaaattaccttcccaaaggattccacaattttatttttattagcaatgtatggaagaattgtttccccacattctcacgagcactgaatattatccctcttttaatttatcccaaactggtgggtgaaaaatggcatcttattgtggatttaatttgcatttccctgactagcgatattgaacatattatattttcatgtttctcggtcatttggtgtttacttttgacctgtttatattctttgaccacttttacactggggttttgtgtcattcttaaaattttgtaagtgttttggaaactagggatactaaaaaaaggtgtatgctacaaatttgttgcccaatttataattattttctattttattgatggagattttgacattaagaaattttttattttcatgtaatcaaatatattatctttttcactatgacttctgaggttttgggtttttttagttaataattaggaagatttttgctactcgaagatcatacaactgttttctcattttgtcttacagtgagttaattgttacttttgacattgcaaacttcattctatttggaatatatttttgaatagcatgaattaacattcttttatattaatcttccttatggctggctaattatgttagtaccatttcttaaataagtcattccctactgaaatataaatgtctattttgtcrtataacatgttatatatttttgtatctgtttctgtattttttctagtcttttctcatgctatttcattgtttctgtggtaaattttaatatctaataaagcaaatcacccttcaccaatctttttttactttcctatttcttataaacttaatagctatatgaacataactaattcttccagttccccaccaactatcccaaataactattsgagttgtgattggtattggaggascatttttcgacaattttggaagaattaatatttttgtgacactaaattttttcatcaagaaatatggtctttttctcactttttttcagtttgcattctatgccatctggtaaaatgttagtgttttcctgtgataaactaagtgatttttccattaagtttacccttaggtattttatactatttgttaagattattaaattattttcctgttatatttctgagcattattattttgttattgctttgtgtttgtagtcttgatttccaaatatgtcccactgttgtttaaaatcctgtttgtgtggggcattatttgttttktttttttgtcgaagtctcttggattttctaaatgtgtaatactgtaatctacaaacaaagtaatttgctgctgctttgccagtatttgtatgggtttttagtttcttgcattattgcataatatgcaacctaaggaaacaattccaactaataataataatagttctatacttgtctcatccctgattttaaatagctataaaagcttacatttggaattacatttgattctgtatttgcaggtttagagcattttcctgttgctcctactttcatagaacttatatttagaatggagggtaaattttatgttatttaatttttgtcttttctatttggcaatttatacactcatgtaatttttttctcctctaatttattacactaaaagaccttccaatcaaagccatyctggcctttctaaaaccaactgttcatattcacattttttgtatatgctactgaatattttattcataatttttgtatctgcatgcataagggaatgttgtcataactctctttttgttatttccttaccagatttggcattaggatcttttcatctgttaccaaagtctactattaaaatcatgtgtttgtttttggcttatgtagaatttaaatgtaaaataatctgattttggctacattttattttttaatttcaacattctttttaaatacgggggtacatgtgcagatttgttacatgggaagattgcatgatgctgattcttggagtatggacagattccatcatcctggtagtgagcatagtacccaataggtagttttctaacccagccccttttactccaccctctggtagtccacactgtctattgttcctacatttatgcccatgtgtggtcaatgcttagctcccagttatgagtgagagcatgtgatatttgattttctgttacagcagtaatttgcttaggattattgcactgtggaaagtagtctggaaatttcttacagaaattaaaacagagttgccatccgatccagcaatgtctttactaggtaaatacccaaaagaaaatgaatcattctaccaacatgacacatgcacttgtatgttcattgctacacagttcacaatagcaaagacagggaatcaacccaggtgatcatcaaaggtagactggataaaaaaaacttgatacatatatttttatggaatactacacagcaatagaaaataataaaatcatgtcctttgtagcaacatggctgaagctggaggccataactcttgtctactttttaaaaggtagatgtttaatttcatttctgatattttctattagtttgttcaggatttctatttttttgcaagtcaatattgatagtttattcttgagggataacatccatttcttttatcagtaaatatcttgccttggagtagtatgtagtcttctattagaagtcttttgttcttttctctgtttcttctgtttctgttctcatagcttacagtctgttttttttttttttttgcttttttctctttctcttgtatttcttttaataaatgccttaccagaagtttatctctctctttcttcttctctctctgtttttgccatttaaaaatgaacttttggctttatatatcctttgcactatgtcttgttctccatttcattatttatagctttcatttttacaaattgttccatttgttattttctagtttactttgatattcttttatatatttccttgactatttacttggctatttttggtcattcttttaaaatcaggtcttttaaaacatctactcttctaaattcactgacgttttgggtttgaccatattcaggaacttgcatttataaaagcaccctgaaattcttgaaggtttctttaaattaattacactattttctctttaactctttagcaatacaatttccaacataatattaatacattcactgctaaaacgctcacacttattgtttatattttcccagagaaacatcctcatcttccaatgaagtttctgtcatgccagaatgggatcacgagtctctttctttcaaacccaagagtctaacaccacataaattacccagagagctaccaaaaaattcagttacatcattctattttgtgggcttctgggtgtaaagccagtgtcacttttcaaataggctgatatcctgtaggcttgagaaaaggcaaggtctcgttagtgtttatattcactaaagtatcttgctcaagccctggacaccgtagattctaggacactattgactctaggtgtctggtgaaacagtaggcactaaaaattagagaaatcacagttaaatttattttgagccaagtttaaggacttaactcttaacaacacaaactcagtacaacccagaatgtgtcccacagtaggttacctggggcacagtatatataacaggagtatccgtttggcacaggtggtaagagaagcagggagagaagcaattgttgcatttttttattctgctgggtgcttggtgatgctatatataaaatagggtatgtgtgcagttgagtgggtagggagaaaggtgaggcatcttaaggcctggtggagggtgactgatttcatcctgtcttagttctgcatgtgataaggaggtttataaccaatacttgtcagtgttaaatatttaacaaactccagttacacaggtaagaggtcagcggtagcttataggcctaggttttattatcgatgtgcccaactgcagccatcatgggccactgttaaaattttcttttgaactttcatttttctgataattgcaaccagtgagaggtgaagaaaaagttcaagggaatgacctgatcttatatcatccaatacaggagatgactgatgacatggattcatacacaaacgtatatcgtatgttctccaaagascctcaaaaatcagaagaagttttgaaaaattgtgagatcgtaaactggaaacagagactccaaatccaaggtaacgagtctgaagaaatgggcaagcagctgtgcttctcaaattgtgtcttcaactaacagcattagcatcacctgagggctcattagaaatgtaaattcacagaaactctggggactgggagaggtggagcaatctgtggtgtgacaaggactccatctgactgtggtgtaaactcaagtttgagaactactaagcactgaggtattaatcaggtgggagcagtgtaagtagagaactccatgtctgacaagattgctttcttggctttcttcccaggtcttcaagaaagtttaggtgaggggataagagtggctacattttcaaagtcagtgaaagtagagcattcgagagcactcctcttggttacggaagatattctgaagctcaatgcctccagtaaaagcaagcttggaagctgggctgagacaggccacccagatgatgaatttgaaaggtacaaaaacatgtgctgatcatttataattgcgattccttgtacatttttgtaattcacataaatcagttttggaatgaagagaggatgaattcattccttgggatgaataaaggttgtcaaagttcaagatccaaaactttgcaatggtgagtctttaaacaagaagagttcctgggatctctagattgggatggcacctagaaattacaggattggggatgaaagttgttgtctttctttttgttgtctacagtgaaactcccaactttaagtatgcccagctggatgtctcttattctgggctggtaaatgacaactggaagcgagggaagaatgagaggagcctgcattacatcaagcgctgcatagaagacctgccagcagcctgtatgctcggcccagagggagtcccrgtctcatgggtaaccatggacccttcttgtgaagtaggaatggcctacagcatggaaaaataccgaaggacaggcaacatggcacgagtgatggtgcgatacatgaaatatctgcgtcagaagaatattccattttacatctctgtgttggaagaaaatgaagactcccgcagatttgtggggcagtttggtttctttgaggcctcctgtgagtggcaccaatggacttgctacccacagaatctagttccattttagacaatgaagctgcttagtaatctctgccaagccatctcttaatattaaagcagacaccacagaatagatttcttcacttacaaatgcatattgggcacttataatacagcaggaactcttctcacctggagccttgatgttaaaagacacagccatgctcttgaggagcttacaatcctggctggaggcaggggagggtatattctttaaatatgcttaagtgttatagggaaagacggggttaccagtaaacatgtaactagaaagccaggctcagttcttacctctgggaatcagaactctttatgcaacttggttaatagaatctactatctggaagataaatgaaggattttaataaaattttcaatagaataaacctaatctgtatggatactttatcaaaaatgaatgtccctgctatttctggatttatgaggcaatggtacactaaagaatggaatcagttcagtgartagaaaggtatccaaggtgaagcctgagacgaatggctttcccaggctaccttccatcactgttgtacagaaaagaaatccagagaatcaaatggactggccttgggggtctctgctatggaaatgccattttttgtgtctcctttctcctactctttctcacatcctcttcrtgattgaagcatggcacaaggcaaggtgttgcctgcgagtctggttgtaagttcagcctttggtgtttgcactactgctatcataaggggtcagggacattccggggagaagtgaccactaaggtgaggattagagagtgagtagaagtgagccagacaaaaaaagcagaaaatgcagatgatggaaaggacatgtgccatgcactatcataagaacttcctaactgaacaytgatactacaattctgaatccctgatcttaaaaaataattatacttcaccaacaaaacttggcctcttttggttccactctgccaccctgccattggaacttggattactgtgaacattgcagctatagcaaaataaaaaataaaaaaaataaataattggcattttcattctttctgatagtctagatttgaagcagaaaagatactttaatagaattggctttggaagtaaagtctgccagtattaagaaacacctattttcatctctccataaaaaacaaaacttccacaaaattgaatgtttatatttgatgcgattttaaagtgtgcaattccagcaattaaagaattgtgtaggtcatggagcatttttaaaaaacttcatcttagaaggctgtggtagatctgttaccgcttagtatgaatcaatccaatcagatttctaaactcctaagacctggctgatttgttacattgactgaaatgaaagcatggtctgagaaagagaggaaacatgtcatttgggatttcaaaggttggaacattcttacataaaaaataaactcgggaacttggggtaatatgaaaacagctatatttttcactcaagatgcaaaagctaataaagatgatgaaagaagacaaagcaaataaaatttgcctatttcaaaatggtgcctcgggcaggtcctgtatccagaagaggatgctcatccagggtctgtaagctcaggtcatcttagctcagcccagctggcagcttccctcctctgccccttccctgaatgcaagccagcttcccttatctagcccttcatggtcctgttacgatagtgattcccaaaccttatcatccacttggattaaaaaaacacaagaaagcatgggaaagaggaaggaggatttcttaaatatggcaaaaataagtccaaaattatcagtaaacacaatacagatgaatggggtaatttttttattaaaacatatgtttttcatattgagttaaaaacaaagtccaagaagcatgcattaatctgctctggctgccataacaaagtttcatacactgagtagcttacacaacagaaattgatttctcactcgtttggaaaccgggaagggatatgacaaggttctggcgaggtaggtttcattctcagtcctcctctctcagcttgttgatggctgctctctctctgtgccctcacatggtgtagaggagggctcagactctcttccttttcttagaaggacttagtgtcatcatgggggctccaccctcatgacgtcatctaaactcaattacgtctgaaaggcccacctccaaatacatttggagttgggacttcaacatatgaatttggggatcacagtcagtacataagaaagcacatctgaaataaaaacacaaaggctaaaagaaaggaaaaagatatactaaatgattttgaaactgaaaaagcaaagtaataacatcaatactaagcaaaacagaacttaagacgaaaatctgctaaatacagaattctcccacaagataagtcatgaatcttcctcacaacacaactacaaaatacatatggcaaaagctgacatacaaaaagaaataggcaaatccacagtctcagtaggagaactcaaaatacttccctcagaaagcaacagatgatgccgataacaaagacaacttgacaaaatgccatcacaagttgatatttctggtgatgttggggttatctgcttactgtgtatttgagaacttctgttcatctgtttgtcaaactgaccagcagggggtgctggggagggaaacactccacagggagggtggggaaagttctctaagtctagaggctcctggtccccccatgatcatcatctatcaggggcaagcactgctgatacaggagctaaaaaaatcaattatttaggcagttagtgtgggtaagggagtcgttggtaaggttttccttttaataaaaaagcagcccccatctaattttgttttctaacaacaatcagcctgaaaaatcagctgcaagcatagataagcaagctaaaacttgcaaaggggaatgccggcacctatgccaatagaaaagggatacttggaagccaggcatactcgcatgttcaacatggaggtgtcctcttctttttttttttttttttttttttgacggagtctcgctctgttgcccatgctggagtggagtggggcgatgtcggctcactgcaccctctgcctcccgggttcaagcagctctctacctcagcctcctgagtggctgggatttcaggagcccaccaacaggcccggctaaatttttttttttttgtattttttttagtggagacgaggtttcaccatcttggccaagctggtcttgaactcctgacctcgtgatccaccctcctcgccctcagaaagtgcggtgattacaggcgtgagctacggcgccctgcctcttcttcccttttctttgtcttcaagtgttcaggcaacatggcgctggccagatagagaccccatctgcataataaaagattaggatgggatggccagcctcttcgtgcattcacacctggtccaaccaaccctctgagccctgtgtaaatcagacactggctcctcaagctcatctataaaaccagccgcaacttgccccaaacccagaaacccgctcaggcacccttccaatgcacagggaactctctcttctttcttttgcctattaaccttccactcttaaatccactccttctgtgtctacatcttcaatttccttattgtgagacaaaaagcctctggcatttacccaaatgattctgcttcactgccatctctagcccaagtgccaaaaatgaccactttagcctgatgaatgccacggctgctaccatgctgcttaggacaagcaaggatacaaagatggactggggaatggtttatcagagaggccgcaatgaaagcatatcccatgcaactttccacttcttaacttctgtcattttcaaacttaaaggtttttttttttatttttatgttttgttgttgttgttttgtttttaacagtttctatttctggcccaaagacttctctttgttttcctcctatgacatatttattgtttgttctaaagtcctttccaacatttcctatagtaatttagaagacatgtgtttggttcacatcttgatctcctctccacctagaattctttttactttctcccaggaagattccacccctcctattctgccagttccctctacctcaaacagttgccctttcaggcagataagcctgggccagttctactttactatggacaccaactcttctgaaataacatctgagtcttgggatttgcatatgaatcttcccttgacacagaaaacagtctttccttttaccttcactaaaggcatacacttgggagaatggacagcactaaaattccacaggtttcaaaaccaaacgtgctgtgccattctagagttcttggaatgaagacgacaaagtaggttagaagggatgatttcctccttcctttgtcaccatgaaggagctcctgtttttaaagggaaaaattaacgacagtccaaaagaaactcttgcaaatcaagccttgccatgccaccacgagaagggtaatctgtgtgcctaggggtgaaatttttaaatttttgtaacggtgtccagggtcaccctgtggataacaaaaatatttaaaaacctacaccggtgccaacctttcagaactgtgtgtctttgcaaggacttaccaaggcctagagatgatagcagtctacaggcaaactccaaagcctcccacctgccccaaccaacacacacacacacacacacacacaaacaccaccctgctattctttggccctagatctcacttaaatttattctaaatcttaatctccctgtgccttcaaactcatgtgttgtacagccttggtaattgctttttaaggatattccctgactttataaaaactatttatgagacatatatctaaggtaaaacttttcatttcagcccagatcagcactctttttattagaattacaaatcctgaatttcttagttgctagaaaaatatattgaaaaggaattatgcttgtatagcaacggattatctctggaaaagtactgggtgtctagaggatgagtgaaaattgtttcccctatatatatttttttatttcgaaaagtatatcctgtgtatattcaaaagataacattttataaacagggaaattgcctccactgtggactcttattaattcacttatccaccaagttctcttattaactgacttatccatcatattcccttattaactttttattcaaccactagtatatgcttctattgctcataattgagcacaaatttctttactattatataaaataaagtgccagctattccactttttctcccatacctcaatgagatgacatcttccaatagattcatttccctgttttgctccctcctcccatccagatgagtgtgctaagtgatacaaaatgcttttatttctttacccctcatccccctgagcccaatccctggatgttttatttccaggtgtcatagaattttccttgtggtgtgtcgcttctatttaaagaattcttctttaaaacttttatacacattcctgtagagtctatcattgtccattcagagttaactgtctacataaaatttgtcagattttttttggctcaccactgtttcttctcctttttatctgctcctatttgagatctctgttcccatttgatttgttaaaattctttctccaatattttctgtgtgtaattatgctacttatatgatagctgaagactctcaaattcacaaatacctttctttgatcctcacaagaatataacttctgaagtcttatatatccacaaatatttttcttttaccctcaggggattgatgccctatgaccccacattttaggcttaacaaatttaatttttttctcttaatacataaggaaactgaggtgcaaagaaagaagggaaacttgaaccttcattcaaggtcacaaagctagtaagaagtggatgactagcgatgagggtttcaggttgagattaacaacaaatgtcacagaagacaatagtgtttaacccaacttcaagttcataaaatgaatggacgtttcctgatccctcaacttcctcccccacctcaggggatttcaggatgtaccaggcaaagctgtctccctcgatccccaactgtttctcagtcagtgaggggtgttaagaactcttcactgcccctcttgaagcttacattctggagcagggagagagaaactgaaaaaaaatttgaaaaaaaaaacccagtaaacatatttcctacatactgagatgtagtatatgaaaaaacaacacaggattcaggaagagaagatgatggagggagaaagaacaacaaataaataggaaaagagcctccagataggagaagataaaagggagaggaaacaggaaggggtcagaacaggcctccctaaaagcctggcatttgacagagtgctgcagaatgaagagagccaagcacataccaggggggtagggttgcagtctgaggaagcactccaggaagcacccaagatggtccactagggtgaacaaagaacatacttgaaccaccagttagattcaccttcatctaaaaaataagaaattaaatgtgcctgatatttatttaatatgttaatttcaaaactatatatatatatatagttgatgctcaaatcgttaaaaattaggtatgtaaaattaaagctcatagattactcttgcctatggcaaggagctcctgataggcaaggatacatctcacccatctctgtatcttcagaatccatcatattatgtggaacataataagtatcagtagtatgttggggggaaagatcgaaaccatgctgagcaccggaattctgtgtaaatctttcaaaaaaaaatctcttctactttatagcagagtcccttttcttttttatttttagtagcaactagccccacaccttgcagatgagctcctaagaaatgaatgggtgaatgaatgcgtggac

SEQ ID NO: 93674 - DNA, 21651 bp, Homo sapiens
caaaatataggaaaaaagtccctgaacacagtgactttgcagttgggaagcaaaagtcagcagagaagtcagccaagttagttgataagctaagtcaatggacacttaagataaatggggcatgatttaaacaaatgatcagaaaagcagaaagtagcaaagagataaatgaattgggacaacagtgactttttttctgataggcaggattttgcaaatcccaaatttgaattgaatcaccatctgaatctaacaagaacacatcttcccatagttcctaatacaaagacttaaccagttgtgttactctattctaaagacatgcacaggactgggtaatttatttttaaaaagaggtttagtggactcacaattccatttggttggggaggcctcacaatcatggcagaaggtgaaaggcatgtcttttgtttttgtttttgttttttgagatggagtctcactctgttgcccaggctggagtgcagtggcacgatcttggctcacttgcaagctccgcctcccgggttcacgccattctcctgcctcagcttccttagtagttgggactacaggtgcttgccaccacgcccggctagtttttttaaatttttttttagtagagacggagtttcactgtgttagccaggatggtctcgatctcctgaccttgtggtccgcccacctcagcctcccaaagtgctgggataacaggtgtgagccaccactcacagccaaaaggcatgtcttacatggtggcagacaagagagaataagagagccaagtgaaagaggtttcccttttaaaaccatcagatcttgtgagatttattcactaccaggagaacaatatggagggaaccgccctcatgattcaattgtctccctctggatctctcccacaacacatggtaattatggaagttacaattcaagatgagatttgggtggggacacagccaaaccatattgttccatccctagcccctttaaaatctcatgtcctcacatttcaaaaccaatcatgccttcctaacagtcccccaaagtcttaactcatttcagccttaattcaaaagtccacagtccagagttttatctgaagcaaggcaggtcccttctgcctatgggagcttgtaaaatcaaaagcaagctagttactttgtagatacaatgggggtacagccattccgaacaggagaaattggccaaagcacctaccagcccagtcactgcttgatgtcaagaagtgagttataaaaaaaatggctgcttcttcaattttgccctccaaatctcccataaaaatctctcctgtggcccaccctaactggaagtgtgcagggaagagaatttcaggaaatgttgttcagtcttggcaaggtgacatcttacaaagtcaccacagtaagttctcagtcaagacttattatatgattgcatgagtaaatagattgatactcaggtttccaggtttgtcacaaaggtcaatttaacttataacaaagctataccaaagtatttttaaataaaaacaacttcagatttaggtaaggagaaattttatttaaaggagtgttgcaagaggggagaaaaagacttctgcgataggaagagggagacaatttcaatagggagaactcagaccataagatcaaacatctaaaaggtcaggaagaaaagaactgttcttatatggtgaagagtaagcaaggtctatggagtgtcttttgtttggagtaaggaggctctttctgcatgctattgttggctctggctctggctgagggtgggtcaaagttcagggtcccatagggaggacagaaggttaactaaagtttggtcaagttggttaacaagcactttgttcttatggatcagtgaagatgaacaatttagttaatcatttataagggaggaataaacagggctacggagaacaccatgtgaggatgtgggatgaatattttatcctgagttcaatctattcttggtaggggctcttaaggaagtgttctatgctgacttggccttggggaagaagagaaaattgaccaaattaaacaaaacttagttaacatttcttaacttctcatttgtcagtggcgataagcagttcagctaatcatttatgaagcaaaattgggattttggagcttctgtgcctggtcttgtcataagtaaacaaggaggacgtctgtgagccctaagtcagacggggctggatgtcagaaaaggggattgattacaaagggacacacagtttttggagcgttggaaatggtctatatgataattttggtgctagttacacaaatatatgcatttatcaaattgcataaaattatccacttaaaattagtgaattttattgtatctaaattatgactcaaaaatctgaacaataacacaaaaaattgcagagcttttttagaatacagatttatagactgcataccctctcaccaagtcttctaaataaagaatagtagaagcagggttaaaatatatacatatatatatgtgtgtgtgtatatatatatatacacacatatatatatacatgtaaactataaaatatatgtaaatatatacatatatgtgtgtgtgtatatatatatacacacacacacacaaatacacatattttaatcctcagattgttctaacacataatcaaatttgaaaattttgcgttacatcattttaatgtcttctatataaggactcatcagaaaagtttttttgtttttcttttttgcaggatgggagtctagtagcaataaaatatatgatttatttaagggataatgctaacaataattaaaacagctgacacatattgagtactactcaagccaggcattctactgaatacttgaaacattagctcctttaccacatgccagattgcaaagattactcttacttaatatttttcagtttgtttcaaatctacaacaaattgttgtgcagaagaaaagtcacccaatagactttttgggtgtgggttagctgctgcttttcccaatgacaataatataaagagtattaataatcataatcactcatgggatgcttactatgtcccagatgctattccaagcaccttgtaggtcttgatttatttaattgtctcaactactctatgcaacagatactaaagtcattgccatttatagatgaggaaaccaaggcactgaggaagtaagtaattgctcaatgtcatacagcttctaagtggcacagtcagacttgtcttggatggaaacctaattcaaaagatgcttgtgcatagagaatgtatttgttaatctcagtacacccttgattattggaattctgggcaatataaacattttgtaagtatttttaaaagttttaaaaatgatattaaaataatttatgaaagaggtacctgtactttccaccagtcttattttttcttggagtttgtgagaagtttagtgaatagggcaccaataaaatagtaggaatggaggccaggccattcactagaactgcctattgtgcctgtgtatcttccagctcttctcattccttgatgttttttgatcctctgtttagttaaggtacctgccaagatgttccatttgcagagtccccatgtactgcagatgctagagaaatccatgaggaagtgcctccctgaatccctaaagatgagagtggaacaattttagggaacaaaggactaataactacctattaaaaatgtgggaaagagaacaagcattcactgagcacctattctgaattccaaacatatactgtcaacaaatttttgaccaggatactaagaggacacaaagagaaaaaaaatagtctcttcaatgaatggcattgagagaactctggattttcacaccccaaagaacaaaattggatgcttatcttacaccatatacagaaatcaactcaaatgaattaaatatataaatttaatacctgaaactataaaattattagaaaagaacacaggagaaaacctcctggacattggctttggcaaggatattttgaatatcacaccaaaagtttaggctacaaaagcaaaatttaactaaatgggactatattgaactgaaaatctgcacagcatttgcaacaatcatcaaaatgagaccgcagcctatgaattgggaaaaatatttgcaaattataaatctaatatggggttaatatccaaaagttatgaagtactcatatgatcttaaaacttagtagtaaaaaaaaaagcaaacaagaaatataaaaaggacctgaacagacatttctccaaagaagacataaaaattgccaagaagtatatgaaaaggtacacaacattattaatcttcaaagcaatgaaaattaaccctactatgagatactacttcatagctattagggtggctattatcaaaaagtcaaagatacagtttaatgagagcgtgaagaaaatggaagctttgttggaacaaatgtatgtggggcagtcattatgtaagacagtatggaagtttctaaagaaagtagaaacagaaataccacatgacccaacaatccctcttctggatatatatgcaaagaaaatgaaatcattacttagaaatgatatctgcactcccatatttattgcagcattattaaaaatagccacgatatggaaacaatctgagtatccatcaatggatgaatggataaagaaactgtggtatatgtataaaaaaatagaatattatttcagccttaaaaagagagatgttaccatttgccacaatataaatgaaaccggggaacattatgctaagtgaaataagccagacacagaaagaaaaatagtgtgtgatatcacttatatgtaaaatctttttttaaaaaatgtcaaatatacagagatagagaataacacagtggttaccaggggtaggggaggggagaagaaatgtgagaaatctgggtcaaaggatacatagtatcagatatgtaggataaatacgtctagaagtctaatgaagactatacataataaaattgtgctgtatttgggattcctgctcaatgactagattttagctgctctcgccgcaaaaacaaaacagaacaaaagttaactatgtgagatgatggatatattaatttacttcactataataaccattttactatccacatatgtcccatatcatgttatataccttaaatatatataaaatttattttttaaaaaatcaccaaataaaacaatataaaaatgaaatatttcaaattaattattaaaatctagaaatggaataatattagatcttaacaaacacaaattgttactggtattcttgctgagtcgtgagtgcctatctgtgcaaaatttttccactattctaccctatctgggtagttgtcctctgggtcttctttcatcttcaaatcatcctaccttatatttgttaactttgagaagacctttttgaacaaattttatgttttgattttgttggatatgtaattttttttaacaatagtgcatcatagtctacgttttaaagacatcatgtgtattcatttttgtatagctttatcacatatagatgaaaattttgatattgtcacattaataatacatttgttctgaaactctttgaaatagagcaaaatttattcttgcaacagaagcatgactttgacaataatacttttctttgtcctgaagattacagaattagagaacgttttgtaagccagtgcacatttagttgacctaaaattgtaatccaacttataaatatttgactcagcaggatttttttccacataagttgaataatcgatctcccaacttagtttcatgacatacataattcagaaataatgattgcacatcaaaaattgatatttaagtttgcaaatagcaaagtataataaaatactgaatacaaatattgcaatcacttggtataagcaatttggtataagcaatttgatttattccatgttgcccaaacaggagatgacagatgactttgatcactacaccaacagctaccatatctattctaaagatcccragaactgtcaagaatgccttgacatgtcaggtatcatcaactggaaacaacatttgcagatccaaagtaagatgactaagatatattctggtttctgggactacctgtgtctacattgcaggttcactttcgtctggagagaattctcttacaaactttactttcttctaccaatctccaaactcttagcttgatgttcattccttttatcagctgccaccacctcttcagtagagcaggattcaaatattgcaaactttggggttgatataaggaactattagtaatataatttcttgttagctgaggactcatgatacagtttgcagacacattcagaatcttttagggagattagatgtgagagctgagcttcttctctggtcttccagtgctggagtaaggaccatagctcattgtgtcacacagcacctcccaggtcagcaaggatgacgatggttacagttatgagcatacctcctagagtcagactccccagggtggcatccttgctcttcttcttacttcatttgtgatcctttgcaagtgtcttaactattactcagtttcctcacatataaacatgaggatagtaaaagaccctaatgcatagggtcaatgtaaggaataaaagtattagatcagtacctgggcatgtagtatgggcacaatcaaggtgggcaactgttttttctttaaaaaatactacttttcctttgatttcacaacgatacagtcagggtttctagtactatctctggcctaaaagaaaatttgctcagggagtcacttgcttatagtcacacagttagtggcaacatccaaagcaagactgtctcactctaaattccatctacttccatcaggcaacttcctgtakcttctaaatgggcatttacttcactcctgtctaggctcacagtccagactgaatgaggtaawacaaagtcttgtagctgctaaattggtcaaagtcaaaagatcacaatgccagctttatgaaatgcctgagacagcaaagaaactggttccctttctgctagagacaaagaacttatgttataaatctggaatacttaaggccatgtaagtttaacaaaagatgctctgcactactcacatctttttctactaaagtagcctccaagattctcttcctgtgttcactcttgccttcctaaattccatttccagggtgattcctttagtatgtattgtagattatgtcattcacttgcttataagccaccaatgtttctcagctcactttgaataaaatccaaactccattatgggtcttgaaggccccacaagaactgcacccatcacctcttgaacttcatcttgtccttattgctcatgctcaccagcagcttgaaccttctttctactacttgattctcatgcactcacacatacctttgagccattggatttgtttttcatctgcctataaaattattccctctgatcttcttttctctttgcctttcataaaaatatcatttcctttgacacttcttttcagagcaccctatctaaaactacccctcccataattcgccattataaaacccaatttttattttctttattgcacttataattactgaaatcagcttacttgtgtatttatctacctgtgtgttgtgtaaattctcctccacaatatttcaagtcccatgagagcagagatcctctctatactgtttaccgatagatcctcatagccagaaccgtgcctcacacatagtatgtgcctaataagtatgcacttaatacattcattttaacaaaaagtgtttttagtaaaaataatgtaaaccaattctatattttccccattgatttatagtcaaatacttagtagaatttcaaattgctgacaaagatttcatttagagatgattaatctcatggtcctctgtgtgttaatgtgcctggaagagctttattcactttgtaaagcaccttacagcccgaaaagcacctctacatccagaatcactgtatcctcttgtccatcctatgagatagataggataggagacattctctccatttcctgacagaaagcagactctgatgatgaagtggtttgataaccacatacttgattaagggtgtaactggggcctgagtctagatccagttccacagtttgggctcttttcagaaagactcccaatcctactcccaatcccctttacaccacttcaggagccttcagacttcagtcctctttaacacgggtcatctgcattccatatcgttgcctctctctatacttcagctttcccatttgtttaacacagtggccaaggatgctctgacaccaacattctaagatttcatgattctaagctctggctttactgcctattagcatgtactttgaggaatcatttattttctgtttacccatttttttcatctataaaatggggctgatatcatctgtcccatcttacacagcaggccacagaaacatcaagaagaacaatatttaacttttataaaattttaatttttatggcactgttatagctccttgtcatgcagtagttcttataatatccatgtctgtctttgatggagtttttttattatgatactttaagttatagggtacatgtacacaatgtgctggtttgttacataggtatacatgtgccatgtttgtttgctgcacccatcaactcatcatttacattaggtatttctcctaatgctatgcctccccaagcctcccaccccatgacaagccctggtgtgtgatgttccccgccctgtgtccaagtcttctcatcgttcaattcccacctatgagtgagaacatgcggtgtttgattttctgtccttgtgatagtttgctgagaatgacggtttccagcctcatctgtgtccctacaaaggacatgaaatcatccttttttatggctgcatagtattccatggtgtctatgtgccacattttcttaatccagcctaayattgatggacatttgggttggttccaagtctttgctattgtgaatagtgccacaataaacacacatgtgcatgtgtctttatagcagcatgatttataatcctttgggtatatacccagtaatgggattgctgggtcaaatggtatttctagttctagatccttgaggaatcaccacactgtcttctgcagtggttgaactaatttatactcccaccaacagcgtaaaagcattactatttctccacatcctctccagcatctgttgttttctgactttttaaggacagccattctaattagcatgagatggtatctccttgtggttttgatttgcatttctctgatgaccagtggtgatgagcattttttcatgtgtctgttggctgcataaatgtcttcttttgagaagtgtctgttcatatcctttgctcactttttgatggggttgtttgtttttttcttgtaaatttgtttaagttctttgtagattctggatattagccctttgtcagatgagtaggttgcaaaaattttctcccattctgtaggttgcctgttcactctgagggtagtttcttttgccatgcagaagctctttagtttaattcaatcccgtttgtctattttggcttttgttgccattgcttttggggttttagtcatgaagtccttgcccatgcctatgtactgaatggtattgcctaggtttttttctagggtttttatggttttaagtctgccatttaagtctttaatccatgttgaattaatttttgtataagatgtaaggaagggatccagtttcagctttctacatatggctagccagttttcccagcaccatttatcaaatagagaatcttttccccatttcttgtgttcatcaggtttttcaaagatcagttggttgtatatgtgtggtgttatttctgaagcctctgttctgttccattgtctatatatctgtttcagtaccagtaccatgctstttcggttactgtagccttgtagtatagtttgaagtcaggtagcatgatgcctccagctttgttctttttgcttaggattgtcttgggtatgtgggctctattttggttccatatgaacttttaagcagtttttttccaattctgtgaagaaagtccttggtagcttgatgtggatggcattgaatatatacattatgttgggcagtatggtcattttcatgatattaattctttctatccatgagcatggaatgttcttccatttctttgtgtcctcttttattttgttgagcagcgatttgtagttctccttgaagaggtccttcacatcccttgtaagttggattcctaggtattttattctctttgtagcaattgtgaatcggtgttcactcatgatttggctctctgtttgcctgttattggtgtataggaatgcttgtgatttttgtatattgattttgtatcctgagactttgctgaagttgcttatcagcctaaggagattttgggctgagatgatggggttttctaaatatacaattatgtcatctacaaacaggggcaacttgattcctcttttcttaattgaatatcctttatttctttatattgcctgattgccctggcaggaacttccaacattatgttggataggagtggtgagagagggcatccttgtgttgtgccggctttcaaagggaatgtttcaactttttgcccattcagtataatattagctgtgggtttgtcataaatagctctgattattttgagatacattctatcaatacctattttattgagagttttcagcatgaagcgctgttaaattttgtcaaagtccttttctgcatccattgagataatcatgtggtttttgtcattggttctgtttatgtgatggactatgcttatttatttgcatatgttgaaccagacttgcatcccagggatgaagccaacttgatcatggtggataagcttttttatgtgctgctggattaggtttgccagtattttattgaggatttttgcatcaatgatcatcagggatattggtctaaaattctcgttttttgttgtatctcagcgaggctttggtgtcaggatgatgccggcctcataaaatgtgttagggaggagtacctctttttctattgattggaatagtttcagaaggaatagtaccagctcctctttgtacttctggtagaatttagctgtgaatctgtctggtcctcagcttttttggttggtagactataaattattgcctcaatttcagagcctgttatgggtctattcagacattcaacttcttcctggtttagtcttgggagggtgtatgtgtccaggaatttatccatctcttctagattttctagtttatttgcatagaggtgtttatagtattctttgatggtagtttgtatttctgtgggatcagtggtgatatccacgttgtcattttttattgtgtctatttgattcttctctctctttattggtcttgctagtggtctatcaattttgttgatattttcaatacaccagctcctggattcattgattttttaaagggtttttttgtgtctctatctccttcagttatgctctgatcttagttatttcttgccttctgctagatttgaatttgtttgctcttgcttctctagttcttttaattgtgatgttaggtgtctattttagatctttcctgctttctcttgtgggcatttagtgctataaatttccttctacacactgctttaaatgtgtcccagagattggtatgttgtgtctttgttctcattggtttcaaataacatctttatttttgccttcattttgttatttacccaggagtcattcaggagcaggtcgctcagtttccatgtagttgtctggttttgggtcagtttcttaatcatgagttctaatttgattgcactgtggtctgagagacagtttgttgtgatttctgttcttttacatttgctgaggagtgttttatttccaattatgtggtctattttagaatatgtgtgacgtggtgctgagaagaatgtatattctcttgatttggggtggagagttctgtagaggtctattaggtccacatggtgcagagctgagttcaaatcctggatatccatgttaactttctgtttcattgatctgtctaatattgacagtggggtgttaaagtctcccattattattgcgtgggagtctaaatctctttgtatgtttctaaggacttgctttatgaatctgagtgttcccatattcggtatatatatatatatatatatatatatatatatatrtgtgtgtgtgtgtgtgtgtgtgtatatatatgtatatatatgtacaacaagaagagctatcatatatgtgtatatatatgtatatatgtatgtatatgtatacatatacatacatatatatgtgtatatgtatatatgtatatatgtatgtgtatatatatatacacatatttgtgagtgtatgtatatatacatatacatgatagttagctcttcttgttgaattgatccctttaccattatgtaatggccttctttttctcttttgatctttgttggtttaaagtctgttttatcagagactaggattgcaacctctgctttttttttgctttccatttgcttggtagatcttcctccatccctttattttgaacctatgtgtgtctctgcacatgagctgtgtctcctgaatacagcacactgatgggtcttgactctatccaatttgccagtctgtatcttttaattggggcgtttagcccatttacatttaaggttaatattgttatgtgtgaatttgatcctgtcattatgaggttagctggttattttgtcatcaattgatgcagtttcttcatagcattgatggtctttacaatttggcatgtttttgcagtggctggtcccggttgttcctttccatgtttagtgcttccttcaggagctcttttagggcaggcctggtggtgacaaaacctctcagcatttgcttgtctgtaaaggattttattcctccttcacttatgaagctcactttggctggatatgcaattctgggctaaaaattattttctttaagaatgttgaatattggctcccactctcttctggctagtaaggtttctggtgagagatccactgttagtctgatgggcttccctttgtgggtaacctgacctttctctctggctggccttaacattttttccttcatttcaaccttggtgaatctgacaattatgtgccttggggttgctcttctcaaggagtatctttgtggtgttctctgtatttcctgaatttgaatgttggcctgccttgctaggttggggaagttctcctggatcatatcctgaagagtgttttcaaacttggttccattctccttgtcactttcaggtacaccaattaaacgtagatttggtctttcacatagtcccatatttttggaagctttgttcattttttttttcacttttttctctaaacttgtcttcttgctttatttcattaatttgatcttcaatcactgatattctttcttccacttgatcaaaacagctattgaagcttgtgcatgcatcacgaagttctcgtgccacggttttcagctccatatggtcatttgaggtcttctctacactgtttattccacttasccattcacctaaccttttttcaaagcttttagcttccttgtgatgggttagaacatgaccctttagcttggagaagtttgttattaccgaccttctgaagcttacttctgtcaactcatcaaagtcattctccatccagcttttttctgttgctggtgaggagctttgatcctttggaggagaagaggagccctggtttttagaattttcagcttttctgctctgatttctccccgtctttgtggttttatctacctttggtctttgatgttggtgaactgttacagatggggtttttggatggatgtcctttctgttgatgttcatgcttttcctttctgtgtgttagttttccttctaacagtcaggtccctcagctgcaggtctgttggagtttgctggatgtccactctgtgctctgtttkcctgggtatcaccagtggaggctgcagaacagcaaatattacagaacaacaaatattgctgcctggtccttcctcaggaagatttgtcccagaggggcacttgcctgtatgaggtgtctgtcggcccctactgagagatgtctcccagttaggctatatgggggtcagggacccacttgaggaggccatccgtccattctcagagctcaaactccatgctgggagaaccattgctctcttcagagctgtcagacagggatgtttaagtctgcacaagtttctgttgcctgtttttcagctatgccctacccacagaggtggtgtctatagaggcagtaggccttgctgagctgtggtgggctctgcccagtttgagcttcttggccactttatctactcaagactcagcaatggcagacacccctctccccaccaggcttcagcctcattggttgatctcagactgctgtgctagcagtgaacaaggcaccatgggtgtgggacctgctaagccaggcacaggagagaatctgacagttgctaagacagtgggaaaagtgcagtatttgggcagaagtgtcccattttttcaggtagagtctgtcatggcttcccttggctaggaaagggaaatcccctgaaaccttgtgcttccagggtgagacgatgccctccccagcttcagtttgccctctgtgggctgtacccattgtccaaccagccctaatgagatgaaccaggtacttcagttggaaatgccaaaatcacccatcttctgtgttgatcacactgggagctgcagactggagatattcctattcggccatcttgaaayagacctctatggagttgttattaatatatccatgttatgtcagaagaaatggtggcagagagattctaagttacctgttcaagatcacacagacagtcatattatgaacccaggcagtctggctgcagagactatacccttatctgtgttcctatttgcctttcaagacaatttaagggaatacaaatatccatcacagtatgtgtgatattttgggcttttcttttccccttctatcaatagtaaccaagagatgtttaaactctcatctctgaaaaccacccatgcttccttgatgaataaattctggcattttggtggcaatgagaggaaccagagattcattgagtgctgtattcagaacctcccattctgctgtctgctggggcctgaaaggaccacggtgtcctggtttgtaatggaccatactggagagctgtggatggcagccatcatgcctgagtcccggggccagggcctcatgtcctatcttatctggtcccagttccagattctggacaaacttggcttccccctatattaccatgcagacagagccaacaaatgtgtacagggtgtaagtcatgctctgcatcatattctcatgccctgtgaccagaaccaatgaaactgtgtttctctgtgaagctagccctgaacataagacagtgttgtgtggaatgtgcatgcgagtggaggagtgtatggtggacagagagaaaggatgaattttaataaacaggaaaggagtggatgatatttgggctctggggaagcagtgtgaatggtcaataggtcttccttggtccctgcacttgaattctccttccaatctagcagacatggtatggccaaatcttcctgtagtggtctctgattttgttcaatttcctatacctctagatctccgtgacactttttattcagctgcatgctgccctggtgcctctcttggaactcatgtcttacatgtggattgttgataatgggtagattttgccagttttgatgagatatggtattatcttttgggtagtataatttttccctgtttttctatgacctcttcatttagtagccagagtgtgtcctttgtctctcagaggtattttgaagtgattattttatggctagccctttgatctgcttaataatcacattaacatgtatgaaaaatatgtgacattagatgtatatgacacctggggaagttattaagagaaagactagctgttggtaggactttttctcactgccaccccaggaaagtgagactggtattacctttctaaagttgggtgaaatttcatccccatgatcaccttactataaagaaatcttatgtttgattgtggaagttaagattgagtgtccatcagttagaggccatggagatgggatagtgggaagagagagagatacatatgtatcattagtgacaagtattcaattagactaatgtagcccacttatacaacctttatttaatgtatatattttgggggcacatgtgatatttggtaaatgtatacaatgtgaaatcatcaaatgacaataattcggatatccatcacttcaaacattcatcttttctttgtgttgggaacattacaatgcctctcttctagctattttgaattatgcaataaaatattattatgtataataatgtttcttttctttctttttattcaatcctctgttatttcttttttaaaatttattttcttgaggaaaattctagggactggaagtagtgacattgaaatgagccatgattattctgcttattgacatgacatttttatgtcctttctgcatgctggcaatatcaaacacatgtaccaaattctcaacaatttgcttgtttcaataacagcaataaatattaactgattgccaagcactgttctgggcattttggatacatactgaacaaaatatagatcgcttgcagggcttacattctagtgatcacctattaatataaaaataaaacataccagtaatatgatataaacactgagggcatggggcagcatattacagtgattaggatggagctaaactccctggatgaagatcccagatcttccttttatcaactataaagttgggcaaattatttaacatcactgtgctcatagcttctttatgtacaaaatgaagtattatttattgaaaggatcaaatgaatgagaaaatataaataaaaacttagagcaatgcctggcacatgttaaacattccaaaaatgttacttaaaatatttgttataaaacatcaggacaggtgcaatatgaagtgaagattattatatagtgtatccgtgagaggagcagtcaacaaattcaaactaagctataagatttccagattataatttacaaatcggattcaaaatagtcttgtaccaatttatcatctaccagctgtatatgttctgtaatcctggagtcagaaaacctaaatttaaaaacatatccagtgttctgggtccacctttaggatacacctttgtctgtggggcaaatggccaaccatgaacctataaatgcatagacagctggtgcataggaagtacttgttttcttgggcgtttagttgctcatttctgtgtccataactctagtgatgcctggcaaagaaccagctttttagaagtttttgctagaacaaaaagattgatattaggtcttttccaagataaatatttatcaggcagcctaccatatggtgtaggatatttcattgggtgaattatcttgtcctgtggtgaattatcttgtggggacttgccatgcatgaacatatgattaggaacctttccatcaccctaagaaggtttgccaatgtgactgcattggtcatagtggctcaacagagagtgatagattctttggcttgagcagtactagataattgaattgctctagactataccctggctgaacaaggaagtatttgtgttatggctaatacatcatgctgtgtttacattaatacttctgcagaagttgagacccatctagataaaattagacaagaagctgcttggttccaggaagtgtcccataacaaacctggatagagagagtctacttaaactaggaattacaattctatgtgtattgggatttcttttccttcaggtctgtagctgctgtctatcttgtacttttaaatcaatttcctctgctaatggaatgattatatgatctattagttcattttcacacactgctatgaagattgtactcaagactgggtaatttataaacaaaggagatttaattgactcatagttccacatggctgaggaggcttcagaaaacttacaatcattgtggaaggggaagtagtcatgtcttacatggcagcaggcaacacagagagataagtgagaacacaggaaaaaaactgccattttctcatcagatctcataagaattcactcgctatcactagaacagtgcgggggaaactgcccccgtgacccaatcactttcctccccytacatgtggggattacaattcgagatgagatttgagtggagacacagagccaaaccatatcgcatgatatgcaaaagagttatctgacccatctgtttgactataacctgggatctatgagtatttacaattatatgcaaacaatttcattccttagacccagacccacacctcctttcagcaggaaataactacagtggttgttgcccaaatccctcaagattaaggaatgaattaaaaaatgaaggatttgtaaccagcccatactggccctactccattgataacagaaggtcaggttatcttgtaggtatgacagagcccaaactgcaagtcatacagaggaggcatgcacaactgagaaaaaaaaaaaaaaaaaaaaaaaaaagctgtgacctctaacaacaccaggaaccagtgtttcctctctgtggaacaaagaccaggacatgaccagaacctgaatactggaagcctttaagaagcaaggggtccattggccagaaagcttgggctaaaatctgcctcaacataccttaccatatatggtcagatttgaagcctttcactcagaccctgccaagccaacattcctaatattccccaaaccctttgatcccttaaaacatgcccagaccccaaatcaggaagacagattttagccacacctcctatctccttgattgatggctttgtaataaagtctttcttttctcaaaagccagtgtcatagtgatggcttctgtgcacactgggtactgagctcattgtttaataaaaattctatgtgtgtttttatagctaaagatacaagatacaagacccaactatatgttaatttcatttacttaactatatatacccaactatatgaaggtagtgtatatttgggtcttgtatctttatccattcagccactctgtgacttttatttggggaattgaggccatttacatttaatgttattattgataagtaatgacttactgttgccattttgttgcttgttttctggttgcttttgaggatcctcttcttttcttccttccttactgtcttcctctgtggttaagtgattatgtgcaatactgtattttaatttgttgctttttattttagtgaatctattataggtttttgaactgttgttactatgagtcttacagaaaacacagatataacaagttattttacagagataacttatcttagatcacaaataaaagaatagaaataaagacaaaacccacacataaaaattctgtacattaactttgtctcccctacattttaacttttagttctttcaacttacatatttttatattacctatttctgaatgggttgctgtagctattattattttagatagatttgtcctttgggctttatactagagttatgagtggattgcacaccacacatgaaatagctgagtattctgggtttcttcgtgtacttaattttaccagtgagttttttaccctaaagagatttcttgcatattagtgtttttttctttcagactgaagaactccctttagcatttcttgcaagataggtcttgtggtggtaaattctcccagcttttgtttgtctgagaaaaattttatctatttcaaatttcaatgatggttattctaggtacaatattcttgggtgcagtttgtttttctttgagtatttaaaaatgccatttctctccatccttgatggtataatttccattgagaagtatgttggcaggcaaattggagttccttaatatgttattttcttcttatctttcactgctttagaatcttctctttttccttgctctttgagagtttgaatactagataacttggggtagtgttatctgggttaaatctatacggtgttctaagatcttcctgtacctaaatatttatatctttctcaaattttggaaagatttttgttattatttctttaaataagctttctatcccttgctcttgctcaactccctcttgaacaccaacaattcttcatttggtcttttgagtctatttctatattttgtagatggtcttcattactttttatttgttctttcttctctcttactgtgtattttcaaatagccagtgtttgaggtcagtgatcctttcctatgcttggtttattctgctgttgaaagcctctaaatacctcttcagttcagcaaatgtatttctcagtttcaagatttctgtttgattttgtttttattatttcaatatctgtcaaatttatctgatacatttcttaatggcttttttgtgtaattgatgcaggattttttgctccttggttcagctaaatctgagttcttgtctcacaactaggaaaaattaggcatgaggacaaattagattaggaggacaaattgaaattgaaattaaaattaattaatttaattgattatttaataatcaaataatcaattaaataattaattaattmaattaattaaattaattaaaattaggcatgagaacacattgaaagatgtagattaaaattaaaattaggcatgaggacacatcgaaaggtggaatttattaagtgaaaggaaagctcttagcaaagactggggtctttcacacaggtttccacctcacgaattgaataccaggccaccatacatgagcttaagaggccaggcttctcccctgcataaggcatgaatttctggtggctgcatcccatttccccactgcatgtgggcaggaacctgtgcaggttcccttatctgcacaaaggatcagtgtaaatacatgtggggcaggttggagattctccagggaaccttccttatctgtctaagcatttgtctgcttcccacctctgtcactctctgctgtaaagaggtgcatctaactgctactggaatacggataaagacaaatcttaactgcttcctgctgacagggggcgctgttttaggaagaaggcagtcagatctccctgagagacctgtctaagagtccccagtaaaaggggccatcatctgaggctctggttgcatgactatttggagtcatggcctggaagcaagagggaacaaacttggttattataaaacatgtatcaaaacaaaa

SEQ ID NO: 93675 - DNA, 76221 bp, Homo sapiens
ttccatgactccaataaaagcaagctggaagctgagctgagtcaggccacccagatgatgaatttgagagacaaaaacatgtgctggtcatttataattgctattccttgtacatttttgttattcacataagtgagttttggaatgaaaagaggatgaattcatgctttgggatgaataaaagttgtcaatggtcaaaatacacagcttgcaatggtgggtcattagacaagaagagtccctgggatctctagaatgtgatggcacccagaaattacaggggtgaggatgaatgttgttgtctttctttttgttttctatggtgaaactcccaactttaagaatgccctgttggttatctcttattcagggctggtaaatgataactggaggtgcaggaagaatgagaggagctggcgttacatcaagcactgtataggaggcctgccagcagcctgtatgctgggtccagatggggctccggtatcatgattaaccttggactcttcttgtgatgtaggaatagcctacagcatggaaaaataccaaagggcagacgacatggcacgggtgatcatgggattcatgaaatatctgcatcagaataatagtccattttacttctcttttctagaagtaaatgatgactcccacagatttgtggggcagttctgttcctttgaggccacgtgtaagtaccaccaatggacctgatacccggagaatctagttccattttagacaatgaagctacctagctatcttgtgcaagccatctcttaatatatccgtagaagaaaccatagaataggtttcttcacttacaaatgtttattcggcatttatgatatgccaggagcttttctaacatagagacttgatgttagaagacacagccatgctcttgtggaacttacaatccaggctggaggcaggggagagtatagtctttaaatatgcataagtgtagtagggaaggacgggtttagtagtaaacatgtaactagaaagccaggctcagttcttacctcttagaatcagaactctttatgaaatgtggttgacagaatctgctatctggaagataaatgaaggactttaataaaattgtcattagaatatacctaatctatatggatactttattggaaataaataaccctgatatatatgaattgaggcaatggctacactaaagaatggaatcagtctctttgtttagtgactagcaaggtatcaaagtaaagtctcagacaaatggctttcctaggctacctttcatcattgttacgcagaaaaggaaatctagagaatcaagtggactggccttggggcctctgctatggaaataacatttgttgtgcctcctttctcctactctttctcacttcctcatcattattgaagcatggcacagggcaaggtgttgcatgtgaatctggttataagttcagcatttggtgtttgccactgctatcttaaagggtcacgggcattccaggggaagtgaccactaaggtgaggactggagagtgagtaggagtgagccagacaaaaaaagcggaaaatctagatgatggaaaggacacatgccatgcactatcattagaactttctatttgagcgcttatattacaattctgaatcgctgatcttaaaaacaattacacttcatgatcaaaaggtggcctcctttggctctggtcttccactctgccattcatatttgccattggaactctgctaacatggtgaaaccccgtctctactaaaaatacaaaaattagctgggaatggtggtacatgcctgcaatcccagctacttgggaggctgaggcaggagaattgcttgaactgggacctgggaagcagaggttgtagtgagccaagttcacatcactgtagtccaccctgggctacagagtgagactctgtctcaaaaaaaaaaaaaaaaaaaaaagaaagaaagaaagaaagaaaaaaattggaaggcagaaggaaatgtgagtgcagaagagaagaatgtgatgcgatgatgatgaaagcagagagataaaacatgatgtgattcagagacccaagctaaggagtgaggacagcctctatgatctggaaaaggcaagggagctgatttacccacattgcctccagaaagagctggccctgccaacatgtcggttttagccccataaatcctattctgaacttccgactgccataaatataacacattgtgttgctttaagtaatcatatttatcataatttgttataatgacaaaagaaaactaatacatcatagacataagaatcatcttgaaaatttaaagttaagctttaaatttgcaactcaacctagcaaccccttgtgataaaaagcaagtaagaaaaccaaattttcactcctagccacaaaatttaatttagctgagcatctcaaagctcctcagagggtactcagaataaaaagcaatttttttcatcaaagaagtcatcttcatttaagaaagtgttgctataaagggttatcttgacactaatgattggcattgggtgattttaattctgagatgtctgtcaccataaatgaaattatgagaccataggattgagcttctaattttctgtaagaatacagaggaagaggagggtaaaaatgttaagggtgagcttaaataatacccagatcctggataatcaggtgtcttttgtgctaatgtacatcatcatatttgtgtttgaattaatgattttctactgataagatttgaaatggacagtggaactaatcaacaatatttcttggggatgcatttccactgatgccagccacaaggtcaaatcttaaacccaacatttttcagtgcctgtaggattttctcactattatctgccgcatgagcataaaatgggatttctttctgagaaagataactttcaagatgataaccaatttgcgacatgttgccttggtttctgtgtttggggacagtataacccattctcaactcactggactgtcccatcacaagccaagagacaagctgtgcctctggacccagcacaccaaatcctagaaaatcctggatgcagcgttcaatatatttaaagctcctctcatttttcccaaaggcccagtgttcatttacaagacctgcatgtgaaacacctaagaacatgtttgaaaagtttccttccctatgaagaaaaaaaaaattacctttattcagccaatattatcaaacactgaaattccaataacaccattcctttccttaaggatcctacagcctagaggaggcaatagctgtattacaactaccttttctattcctgcttcaaaatgtttccaaataattggtgggggaacaccgtgttttatggtgtatttaatagcagacagataatatgatatgttataggacatctcaaaatgtcccgttaagtatcctaaggaagaaaatgaacacgtctttaaaagagtgaggatatagaccagagaagccctccacgtggctgaatttacttgaaagatgcgtgtatgaaatcatgtgcattttgagttctactccacaaaatatctaaatatacaagatagtaattcgttgaacagatattccaatcaaacatattttacaggaagatgagaacaatgctgatcttacatcttcatgtgtcccaaagcctgtcatcacatacccagaaacgcagtttaagaagctgcaatataggaaaaagaatactaaatttttggtactaacctttgggattctaatcctgattattttcttttggaaaagttatgtaagactcagttttcttgtttgtaaaattatagtaatatcctctgtaaatatggaaatagtgaaagagagaagatctccaggaatttttgcccctctccagggaggaagacttttgagaagtttgtcagtttcagagtcacttcatgtttgccagtgggtgggtaacagaacgctaagttttctatgggtgatgctttgtttttgctcacttccatgcctaacctgatcctgggcttgcttcctgaaagatctcaagtacgctttcctgcacccctctcctgtggatagccaaacctagaatggcaagatataaagatatccatgcgtaggcttagaggaatcaccttagggcaggtacttcatgccagacttccagagttatactactaaatataatttaatccccatttatcattgttccctgtgtatatgttccccttaacaatctcatgggaacactggtggggcaaagcagtatttgaagactgttaacttttctggctaaatcaaacatatctgtgaatgtgtgtttaaattctatttattttttcaattagtaacaaaattattaagcataaatggattactagaggaaagcaaatctctcttctttctctgatctcctattacccaattactttctctagaagcaaccactaataccaatatattttgtacaagtttcccataaatctatgcaattttagatatgtacatacatttgtttattttcacaaatggtagcatactatatacattgttctatccacctcatgtttttttacatagcaaactattttggaaatattttctaatctgtcatgtagagctgcttcattctttgtaatggcttcatagtattctaatgttttaatgtaccataatgattttttctatttccccattactggatgtttaggttgtttcataagttatgatatcacacattaaatttatgaaaatcttaccatccagtttagaaatatcattcatttattatgcatagtctttgactcaacagttttaattctggtaattcatctttcagaaatatttatacaactgttcaataatctatttatgatgatattcatttcagaaagtgccgtaaattatgtgtacatattgcaaaaataaatacataactcatatggagtactaaaagcatacatatcagtgtcaaaattatttacacctagcaggggaacccaagaggacagattttatttttcattttgtatgcttatatactttctataagcatgtagcattttgtaagatataaatagtttcagtaaacattttttgatgccaccatgatgtccattgccctctccgaaggactcttgtgagctctaagtgaaataatatgcataaagaccttgtctaatgaaggctctgttcatgctcagcacacagttcctaacgtgacgccctttctttacccatgcaattttgtagcccatcataatttagtctcaaattctacacttccaagtacagcctttgtggcaactcaataattctatcaaggaatttgggaagtaaaacgtaaaatctcacttcttatcatcacccattttaaataaccccatattgtcattacttgcagtcttgtgtttctttggtaattccggtataaagagcatggttttcatgtaatctacctgcactgattttgaagttgcaacctttcttattgcttcatccaagccctcctgtcaacctggagagaggagaaagacaggtactgctttataccttccatatcagctaggaataaaccacgcatcttttcttttaactcagactagttagattggatctggaaagtttgctcccagttgataacctcggagcgtgacctcctctaagttgtcaggagctttggtgaagatgtggtaagagttggtgtaatgatcccagtcattttttatctccagatacaacaaatatcatacatagccctacaattacaaaatactcttgcataggcctagaatactagagattaacttgtttgaaacattctgtttttctaagataggtgtagaaaatggccttgcagtcgctccaagaataactcactatttatacactgaagatagtgtctttcttttagggcactaaagtgagctgcccttgagagggtgagtaaatagctccattgtctcgaatgggaagtgtaaccaaaatggtgtatgttaaggatttaaaagagaaggtgcctaaggtatggaaaaaatataagaaacaggtttggcaaggctccgggtttttggcaaggtgacacctgagctaatcctaacccaggaaggactctgaggctggctcagtgattggctcttggagtacatgtgaatagataaacttttggaaagaactawcattccagagccagatagtacctagaatagacagcttggtctggctctacatgtctgcctaccctctgctgatgacacttccacttgagagtcctcgcaggtgaaaacacttcttaatcactttcagccatagaagtctaggttgggatgtagtcctatgatcagaattttgatggaatagactgagtgcttggaatcctaattttatttacacatccagggttattgatcactggatctaagttcaagccttatctcactgccctaccctctctcccaaacagcccttccaaaacctgcatacgtcaacagtgtcaacattcttctcaccactcctcagtttcagttccctcattgccacacagagaatgtctggagagtgactgccctggtattcagtaactattgctcctacctggttctgaggctgagtaatgatgatctggtaatctgtccaggcatctaccatcacctccattttgaatgggtttttatgttttatgttgaaaatggtgctgtatgcctataatgcaacagaacaaaacagtaggggatgaagtttttctccaatgtaaagtcttatatgaggcatgggaaataaggacaagaagcctaggaggacttaggatggggccagtgcttccaaggtggttcattgggctactcattgagagttatgttgcaaaagggaccaataagcatccacaaaaatccatgttaacacccgaatcattaggaactggcttcccttatattcattcattttttaaaaattcatgccatttcacattgtaattgtgaaatgtgtgaaaagttcacattgtaaatgtgtagcagatctttaatggcttggtcaacacaaaatattggctacaatcaattacaggtggtaatatatcctgaaagattaaaattagaaaaaaaaggtccagaaccatcagggccatttggggctaaaaccaggatggccacctcctcctcagccgagtgagtgctggaggagggagcctgaaactaggctcactgtgactcatttgtggcacccattattgcccaacctgcagttcactatggtgaaggagcaattcagactcaccctgcagcatcccgtctgggtcaaacagtggctgctccctaaggaatagttgggggcgctacataaagtagtttaaaaactattgtaaaaaggacatgtttcaccaatgttctttccttagattctccagtgtttgtaattcataaaaattccagccgatggggcatgctgaccaacttaagagctgtcaatgcagtaattcaacccctggggggctctctcaactgggttgccctctctggccataatccccaaagatttgcctttaattataattcatctgaaggattgcttttttaccgctcctctggcaaaacaggattttgaaaaatttgcttttactataccagccataaataataaagaaccagccaccaggtttcagtggaaagtgttgcctcagggaaggcttaatagtccaactatttgtcagacttttgtagctcaagctcttcaaccagttagagacaaattttcagactattatatcattcattatgttgatgatattttgtgtgctgcaaaaaccagagacaaattaattggctgttacacatttctgcaaacagaggtttaaaacacagggctgacaatagcatctgataagattgagacctctactccttttcattatttcagagtgcaggtagaggataggaaaattaaaccacaaaaaatagaaataagaaaagacacattaaaaacattaaatgactttcaaaaattgctaggagatattaattggatttggccaactctaggcatccctacttatgccatgtcaaatttgttctctgtcttgagaggggatccagaattgaatagtaaaagaacattaactccagagacaactaaagaaattggattagttgaagaaaaaattcagtgagcacaagtaaatagaatacatcccttggcccaactccagcttgatttttgctactgygcattctccaacagccrttatcrttcaaaacgcaggtcttgtggagtggtccttccttcctcacagtacaattaatacttttacattgtactgggatcaaatagctacattaattggtcaggcgagattacgaatactaaaattgtgtggaagtgacccagaaaaaatcattctttctttaatcaagaaacaggttagaaaagcctttatcaattctgcttcatggtagattggtcttgctaattttgtggaaattattgacaatcattacccaaaaacaaaaatcttccagtttttaaaattggctacttggattttacctaaaattaccagacataaacatttacagaatgctctgayggtgtttactgatggttccagccatggaaaagcagcttacatcaggccaaaagaacgagtcattgaaactcaatattactcagctcaaagagcagagttggttgctgtcatttcagtgttacaaggttttaatcagcctattaacattgtatcagattctgcatatgtagtacaggctacaaaggatggtgagacagccctaatcaaatatagtattgatgatcagttaaaccagctgtttaatttgttacaaaaacactgtaaaaaaaagaaatttcccattttatattactcatatttgagcacatattaatttaccagggcctttaactgaagcaaatgaacaagctgactagctagtatcatctgcattcatagaagcataagaacttcatgccttgactcatgtaaatgcaacaggattaaaaagtaaaattgatatccataaaaacagccaaraaatattgtacaacactggacccatgtcaagtcctaaacctgcacactcaggaggtaggagttaatcccagagttctatgtcctaatgcattatggcaaatggatgtcacacatgtactgtcgtttggaaaattgtcatttgtccatgtgacagttgatacttattcacattttgtatgggcaacctgccagacaggaaaaagtacttcccatgttaaaagacgtttattatcttgttttgctgtcatgggagttccaggaaaaattaaaacagataatgggccaggatactgtagtaaaacatttcaaaaattcttaaatcaktgaaaaattacacatacwacaggaatcccttataattcccaaggacagacmctagttgaaagaactaatagaacactcaaagctcaattggtgaaacaaaaaaaggaaaaagacagtaagrgtataacacttggtgaaacaaaaaaaaagaaaaagacagtaagagtataacactccccagatgcaacttaatctagcactctatactttaatttttttaaacatttagaaaaatccgacaagtacttctacagaacaacattttactgataaaaaggacagttcacataaaggaaaactgatttggtgaaaaaataataaaaataaaacatgaacaacaggaaaggtgataacatgggggagaggtattgcttgtatttccctaggaaaaaaacagcttctagtttagatacctacaacttacagaagaagttgccatccagcaaggaagtggagccactgacctgggcccagttcaaaaagctgacacagtatactgaaaaagcctgaagaaaacaagggtaatgtgaactccagagaatatactgcttgcagctttgatgactgtatcaatggtggtcagtctccccatgtcttcaggagcagctgcaacttattatacttactgggaccatgtgcctttcctgcccttaattcgggcagtcacatgaatagatagtcctactaaagtatatgttaataatagtgcatgggtaccaggccccacagatgatcgttgccctgccaaacctacaaaaagaaggaatgatgataaatatttccattggatatcattatcctcctacttgcctagggaaggcacccagatgcttaatgcctacaacccaaaattggttggtagaagtacctactgtcagtgccaccagtagatatacttatcacatggtaagtcgaatgtcactcgggcaacaaataaataatttacagtattcttcttatcaaagatcattaaaatttaggcctaaggggaaggcttgccccccaaaaattcccaaagaatcaaaagacctaaaagtcttagtttggaaagaatatgtggctgatactgcggtgatattacaaaacaatgaatttgkaactattacagactgggaccctcgaggccaattatattataattgtatgggccagactcactcatgttcacaagccccatccatctggcccattaatctggcctatgatagtaatttaaaaagctggaccaggtttataaaaggtgaaaatcaccctatccattaaaatggagtaaaaagagaatttcctcacctcgaccaaagttaattagtcctgttactggtcctgaacatccagaatgatgaaagcttactgtggcctcgcaccacattagaatttggtctgcaaatcaaactataggaacaaaaaatcgtaggccatattatactattaacctaaattccaatctgacaattcctttgcaaagttgtgtaaaactcctttatatgctagttgtaggaaacatacttattaaaccagattcccaaattgtaacctgtaaaaactgtagattgcttacttgcattgattcgacttttgattggcagcacagtattctgctggtgagggcaagagagggcgtgtagatccctgtgtccwtggactgactgcaggaggcttccccatctgtccatcttttagcagaagtaktaaaacgatttctaactagatccaaaggattcatttttactttgattgcagtgattgtgggtcccattgcagtcacagctactgctgcagctgctggaatttctttacactcctctgttcaaactgcagaatacgtaaataattggcaaaagaattcctcaaaattgtgaaattctcagacccaaatagataaaaaattggcaaaccaaattaatgatcttagacaaaccgtcatttgaaaggaagataggctcatgagcttggaatatctttttcagttacagtgtgactaaaatacatcagatttttgcattataccccaagcctataatgagtctgagcatcactgagacatagttagatgccatctacaaggaagagaagataatcttactttaaatatttcaaaatttcaaaaacaaatttttaagacaacaaaagcccatttaaatttggtgccaaaaactgaggcaattgtaaaagctgctgatggcctcacaaagcttaaccccgtcacttaggttaaaaccatcagaagttccactattgtaaatttcatattaatccttgtatgtctgttctgtctcttgttagtctacaggtgtatccaacagctccaaagaggcagcaaccagcgagaacgggccataatgacgatggcagttttgtcaaaaagaaaagggggatatgtagggaaaagaaagagatatcagactgttactgtatctwtgtagaaaaggaagacataagaaactccattttgacctgtaccgtgaacaattgttttgccttgagatgctgttagtctgtaactttagccccaaccttgagctcacagaaacatgtrttgtatggaatcaaggtttaagggatccagggctgtacaagatgtgccttgttaacaatatgtttacaggcagtatgctgggtaaaagtcatcaccattctccattctctaggaagcaggggcacaatgcactgctgaaagccgcagggacctctgcccaggaaagccgggtattgtccaaggttctccccacgtgatagcctgagatatggcctcgtggaatgggaaagacyggaccatcccccagcccgacatacgtgaagrgtctgtgcagaagaaggattcatagaggaaggcctcttgcagttgagataagaggaaggcctctgtcccctgcctgcccctgggaactgaatgtctcggtataaaacccgattgtacatttgttctattctgagataggagaaaaactcccctgtgtcgggaggtgagacatgctggcagcaatgctgctctattactctttactccactgagatgtctgggtggagagaagcatacatgtggcccacgtgcacatccaggcatagtaccttcccttgaacttatttgtgacacagatttctttgctaacatgttttcttgctgaccttctccccactatcaccctgttctcctgccacattccccttgctgagatagtgaaaatagtaatcaataaatactgagggaactcagagaccggtgctggttcgggtcctcagtatgctgagcrccggccccccgggcccacttttctttctctgtactttgtctctgtgtcttatttcttttctcagtctcttatcctacctgatgagaaatacccacaggtgtggaggggctggcctccttcataagtatatagccaaaatcaatacaaatggaagcaaagtggttaacaacatgggctttggaatcaaacaaaccaaaattccaccyctggctcctcttctggctatctgggtcaccttaggtaggtcaaattatttgagcctctctgcctcagttgcattatctataaaatggggatagtaatatctacattgtaggttgtcatgaggatttccttgccagaaaaggtgtgtgaagtgtttagcatggtggtaatttgtgtatatacaaggttctgaaggaaattttaaaaacctttaaatccagtgaaggtgaccattccactggacagaaacataaatgaagaaaactgcagcttcaaagatggactatatgtaasttgcttgaataaacctattggcacaaaatagacattttgaggcaaaccacagatctagaacaagctcatctgtttctgtcactgtctaagatcatgggtgcagtaacaaaatggcacagaaatctgcgcattctgcagactttggtagcatatttccccagaggagagtaatctccttggtaagtgatattatgtcttgctctttattgtgactcaagcatcaagctcagcacttagcatagtggaaaaattaataagcttttgttcagtgaatgaacaaatagagtcagtgaaggttagaaatgtggtttttagaatgcttttcctcaaagactgagcattaagtctctttgytcctggcatagccaagtttctgagaaaacacgtggctgctaacagaaactttcaaagcagaagaaaatgctttatagtaggtttttttgcaatgaatattggatatgtaacctatagggggtgcacaaaaatgtggattaaaaaaaggttgtaaatggcctgttgcctctaccaatagcatatgctctcccacccgcttccatttcaccgttagcttccctccatggctggactctggttctgctctcaccaatgagagacacctagtttcaattcactccaaggtgccaaggcagtagaaggtttatgggtcaacatgatgcaatagtctaatataatataatatattcttcaatatattataatggaggattataagagagtgactattggatcaggtgttttttaacaaaatcgagaggaaaaggagccagtagaagagatcggaaacatggcaaaaaaaaaaaaaaaagaatgtgaaaaataagagaatgaccttggaagtcaaaataagagaaaccttcaaggaaagagtgaccaaagcagtcaaagkttgctgagaagctaaaagagatgagtactaaaggcggcagtgcattttgaagttaggagttgattaccgactttgtaagagacatggacaggagaagaaatcagattatggggattggagactaaatgaaatgtgaggaagtgaaggtaactttttgaaagagcttgaccagaaaagaaagaagaacacgagagtatcaaggggaagaagagaggtacaagagctcaaagaaaggcatttctcttattagatgagagttaagcatacctatactaactacaagaggtaagatgtaagtcattgataggccaatgtgtctaacaggacatagaaaggtgacagaaattcaatgaccttatgtacaaaatgccagccactatttcagcttatttatgttgactaattcatgtaatcatcaaccataattatcagcatacttgttaaattaagttttgaacaggaagaatacttcttccagtgagaagtcaaaaaaatttaggatggatgcagatgcaaatgtatgtatgtaggtatacagcaggtcatcaaataatgtcattttgttcaatatcttttcattataatggtgaagagaaaaaaaacagttcctggctggaccactgtctatgtgcagtttgcctgtcctcctcatgtctgtgtggactttctctggataatcccatttcctctcacatctcaaaaatgtgtacattagtatattgacatgtctaaattttcacaggatgagtgtgtttgtgtgtgtgwgagagagagagtgtgtatgtgtgtgtgtgcacgtgtgtccccaggatggaagggtttccagtccagggtgggttcctgccttgtgctctgagctaccaggataggcttcagccacttgctccgctgaactgcaataaggcagttgaaaaatgaatgaatgaaacattcataataaaacaaaaattcataaagtctatgataatgatacaaatgcatgacaataaacaatgctgtgcaaaaggactcagcgagcccatcatatttgtgatggatttttaaattcatagatacaagagttgcttcttacaccttttgctttgcaaacatttatttctcaatttaactcaccaccactgtgatcaccatcacacatcaaygcaacaaaaatcaggtaaataattatctyacttgtttgtatcaatatttcttaaatgtatatacagcttacatttattgcattgttttayattagaagtgcttcagttctttataagtttggtgatgtttttgtcaccagaaatatgctgtaggaacttaactcttctttatattaattagcttatggtaaaaataattttgatatgtgttgtttcatttgatgttgcagtttccaagaacctattgacaatgttaagtaaggactaattgtatacaggagtacacagggttagaaaaaaggagcatagagttggcaagttatttttgaatgtctatttcctggaagaggtaaaatttcttcctattcccaaaatcactttttagaagtgagtgggtgagggagtatgccaagaaagtgttcagaaaaagaagtaggatgttasgggaaatggttagggtataaatggcttttgatgttaatgggagaaasagtggactagaattagcaaggactggcaagcatgcttaggatcatgtaaagagggacaccatcaytggaagtgttactcaacagtwtattaagctcagcaccctaaaagtagaagcacagaagacaaattaaaacaaaccaagattggctttttcagggctggataacaaaaaagataagggacaaagcatttgagaacatagtaatgagggattgaaactcacatctaagatagagaagaaaaaagtaaagtaggttggagaccaataaagtgagaaaatatagaaaaagcaagggacgaaagtacttgatgaagtcaaagaatagcaatgttaatagacaggggaaaatgtacttacaaataggagactggagtcagatattaggctattagaggttgagatttcagaggtattcagaagtagatcagtttggcatgtatgactgttggcatcaactccaagtcaatagagtaggagccaagaagggaatgggagcttcaggtatcacagacatgaacaggatgtagcagaagttggctgaagagaaaaattaggatgtcaggtgccaaatatttcaacgaatgcagagaaatttggcagagggcaacagaaaagcattgttttattccagccacatgacacagaaggaagaaggaagatttttctatgcaaataagtaatactctagaagcaggattggaggcaaggagaatactgattttttttctttttggtaactatattaccctggagatctagaggttgttagagaaatgtttaagcatattgataatttataattcaaggaaagcatttggacattttacaaattcaaaaggctacacactggctttttctaaagtattttccagcttcaggtacctaaaaggttttgaagaatttgttctcaacattgagaccctggtgagtgctcattccaagggttttcaggggaaaagaaataaattaacaaatacaaatgattgagaacaagaatcctaattaattgaaatgccaagaaaaaaaggctgttctaaacaattctgcttacctgaagtttctttgcagagctgtaggcacactgcctgctgcacttgctcagaatggcaatggaaaggtttctgtagctaacactctatggactcagacacactaaaattcaattgactcacgctgtcactgtttagcataaagcttcaggaagttatgggttcctgtagattaaaccagatgttctgtccgtagacaggaagtcagaggctttgtggaccagaggaggactgagaccatgttctgtattgagcagcctctacaattataagaagttttacacaagaagcttttgatttatacataacttgttatagctgaaagagtattctagaacaatattaagtcaattttctagagttggcaaaaatagcacagctgcagccttatttaaaacaagttagcagagcaaacaaagagttggaaagtttggtttcaaggcaaaatacctggcctaatactttcaaccatttgtgggttggaaaaagacaagaatgcctcaagaaagttactgtaataatgagaactgggtttcatataccttgtcctctggttgtctaaagtggagcaagagggaagggtattgtaagtataagaagaaaaagcaattagtggagaaaagtttcagggggactggaattagctttgtagaggaatagagacaaacattgttttcaatgtgtgttcctcacaccatctacttcaagatcaattgggcttgcttgttaacaatacaagaacttttccagatcaggtaaatcagaggctcccaaagtgcctggcaatctgtatcttataaaaagctatctaaaagagtctgatctatattatattttgaaaacattgagattaaaaaatgggaaaatatgttataaaatttttatcctgggtgcagtggcttacaccggtaataccagctacttgggagtctgaggcagaaggattgcttgagggcagaaatttgatatgagcctgggcaacctaataaaactcatctttaaatttttggtttttaattagccacatataggggcatgtgtctatagtaccaactactcaggagactgagatgaaaagattgcttgagcccagaaatttgagatcgcagtgaggtatttcaccactgcacttcagcctgggcaacagggtgagatactctctctaattaaaaagaaaaaaaagtctttacccactttctggaagtgaaagcaacttcaaattgtaatcatttatgacatgagaaaaacaagagttatttttacacaaataaggaagctgttgctgacaaaaaagtaaatgtcttccctcaagtcacaaaactaaccattggcaatgtctggaatatgaggccgaatatcgaattcttttaatgacaccatgattccatagacagtgattccctacccttaggcagtttataacttcttacaaacctaaatcatctactccagacgacatattaaaaattatcaattaggwttttctactatctgcacatgcttgctgtgtaaggcattgaattttatacttttagttactctactttttgaaccaaaagttgttcacataahcaaagaatttttacatatttataattgtaaatgattaatttgttaaatctatatsaaagtttatagagtttacagtaaactaatcatccttttaaaaaaatggtccatttaaactactcaatacgtattttttattccataattgacagcacactgtggatagytgagagamcacatattttatttctatactgagtattacttaagtaatttcttaagctattaaatattttttaaatagtttataatggggaggagaagcaaagcaaatggcagaatagaaggctccactaatcatttccccataccccacaaggccccaagttaacaactacacagaaaaaataccttcatgagaaccaaaaatcaagtgagcactcatagtacccggtttggacttcatatccctaaaagaggcactgaagagatggaaaaaaacagtcctgaatcaccaacccccctccctcycaacctcagtagcagtcatgtggtgcacagtctatctctgggcacgggggggaaggaagaacacagcaattatgaggcactgaactcattgytgttatgttagacacaaaggaaaactagatcaaactcagctgacacctgcccctggaggcagagggagcatttaagccagtcctaacctgagaggaatcagcaatcccagcagtaagaacttcagtgcctgaaaacctcaccacagggggcctacagttctctgtgtttccaagtaaacttgaaaggcagtctaagccataaggactgcaactcttaggtgagtccagtgctgaataagtcccagaaattgtggactagggggatatttgacatactgagacaccagctgggtcagccaaaggagtgctgttatcacccctcccccaactccaggttgcatatctcgcagctcccaaagagactccttccttctgctggaggaatggaaagaaacagtaaggaagactttgtctttgcatatcagctgagccacaagaggataaggcaccaaacagagttgtgaggcccccgttccrggccactgctcctagacaacatttctagacataggctgggccagaagggaaacctctgcattgaaggaaagaattcattcctcagagcattcaccacctgttaattgaagataccttgagccctgaataacctaagcaatacccaggtactattaatacactgagggctttggatgagcatctgagactagcaggtttcaggtgagactcagcacatttcagctgaggcagctatgaggcaagatkctttcttcttcagaaaaatggaaggagagtaaagagactttgttttgcaccttaggtgccagcacagccacagcatggtagagcagcaagtgggctcttggcatacccaattgcaggacttagctcttgaacagcatttctggacctaccatgggccacaagggagcccactgccctgaagggtgagtcccaggcaaggcagcctttactacaagctgatttaagagccctttggctttaagagaacactggttggtagtctagcaaccagtgggtaggggtcactatggggtgtggctcctctgcctttggaaagagaagagaaaagtgggaaggacttcatcttgtggtttgaacgtcagctcgactgcaatataatagaacaccaggtactcgtctaatgtttttgactctagtccctgacttctggacagcacctctgtatccacccmgggcctgggggatctcactgccctgatgggaaggacacaggcctggccggctttgctgcctgctgattgcagatctccmgggccttgagcaaacataggcagtagccaagaagtgattacagcaggcattgggcaagatgcagtgctctgtgggcctcaggcctgatgtagtgcagtcataatggtggtggccacagaagtgcttatgtcactccacccccagttttaggtggcacagacaagagagagaaatwtttttttttttttcaagaaattargggaagaaaacagagcagtctctgcctggcaatccagagaattctcctgaatcatgtccaaggccattgaggcagtacttttatgagtcttcaaaaaccacagtattactgggcttgggatgctccctaaagtagagagtttaaatcacgatacctatgtcctttcaaatatctgcagagcgttcccaaaaaggatggctacaaataagcccagacagtgaagactacaacaaacacctaactcttcagtgctcagacaccgaagaacatctactagcatcaacaccattgagaaaaacatgacctcagcgaatgaactaaataagtcaccagggaccaatcctgaagaaatggggatatgtgacctttcagaaagagagttcaaaatagctgcaatgaggaaacttaaagaaactttgataacacagagataacacagagaaggaattcagaattatatcagataaatttaacaaagagattgaaatagttaaaaagaatcagaaattctgcagctgaaaaatgcaattgtcataatgaagaatgcatcagagtcctttaatagcagaattgaccaagcagaaaaaagaattagtcagcctgaagacaggctatttaaaaagacactgtcaaaagatacaaaagaaaaataataaaaacaacaaagcrcatctaccgaatatagaaaatagccttgaaagggcaaatctaagaattgttggccttaaagagaaggtagggaaagagacaggggtagaaaatttatttaaaggaatagtragagagaacttccccataccagagaatgatgtcagtatctgagtayaggaaagttgtagaacaccaagcagatttaacccaaagagtatctcaaggcatttaaaatcaaactaccaaaggtcaaggagaaagaaatgtaaaagcagcaagagaaaagaaataaataacatacaatgaagatccaatacatctgacagcagattytttcagtgaaaacctmgcagacagtggcatgacatatttaaagtactgaaggagaaaaaccttttacagtagaatattatatctggcaaaaatattcttcaaacatgaaggaagaatactttccctgacaagagctgagggatttcattaatattagacctgtctcacaagaaattgtatataaagagaagaacattagaaagaacagaacattcagtaagaaaagaacattagtgagcaataaataatcatcagatgtttaaaaacacactgataataatcagtacgcagaaaaagacagaatattataacactgtagctctggtgtataaactacttttaccctaagtagtaacaccaaatgatgaaccaatcaaaaataataactacaacaacttttcaagaaacagtacagtaagatataaatagaaataacaaaaagttaaaaagtgggaagacaaaattaaagcattgggtttttatcagtatactttgtgcttgtttgtttatgcaaatagttttgttatcagatttaaataatgggttataagatggtatttgcaaacgtcatggtaacctcaaacccaaaaacatacaatggacacacaaaaaattaaaagaaagaaacaaaattttatcaccagagaaaatcactttcgctaaaggaaggccggaaggagaaaaacaaggtagaggagttcacaaccagcaaacaaataccaaaatggcaggactaagtccttacttattaataataacattgaaggtaaatggactaaactctccaatcaaaagacatagagtggctgaatggatttaaaaacaagacccattgctctattgcctataagaaacacacttcacctatacagatccacatagactgaaaataaagggaaggagaaagttattttgtgacaatagaaactaagaagagtaggagtcactatacttttgtaagaaaaattgatttcacaggtctggcagccaagatggccaaataggaacagctctggtctacagcttccagtgtgagcgatgcagaagacaggtgatttctgcatttccatctgaggtacagtgttcatctcactggggagtgccagacagtgggtgcaggacagtggwtgcagcgcaccatgcacgagccgaagcagggygaggcattgcctcactcaggaagagcaaggggtcagggagttccctttcccagtcaaagaaaggggtgacagatggcacctggaaaattgggtgactcccaccctaatacggcacttttccracaggcttaaaaaacggtgcaccaggagattatatcccgcacgtggctcagagggtcctacrcccatggagactcactgattgctagcacagcagtctgagatcaaactgcaaggcggcagcaaggctgggggaggggcacccaccattgcccaggctcgcttaggtaaacaaagcagctgtgaatctcraactgggtggagcccaccacagctcaaggaggcttgcctgcctctgtaggctccacctctgggggcagggcacagacaaacaaaaagacagcagtaacctctgcagacttaaatgtccctgtctgacagatttgaagagagcagtggttctcccagcatgcagctggagatctgagaataggcagactgcctcctcaagtgggtccctgacccctgacccccgagcagcctaactggaaggcaccccccagtaggggcagactgacatctcacacggctgggtactcctctgagacaaaacttccagaggaacgatcagacagcagcattcacggttcacraaaatccactgttctgcagccaccgctgctgatacccaggcaaacagggtctggagtggacctctagcaaactccaacagacctgcagctgagggtcctgtctgttagaaggaaaactaacaaacagaaaggacatccacaccaaaaacccatctgtacatcaccatcatcaaagaccaaaagtagataaaaccacaaagatgaggaaaaaagagcagaaaaactggaaactcgaaaaagcggagcacctctcctcctccaaaggaacacagttcctcacagcaacagaacaaagctggatggagaatgactttgacaagttgagagaagaaggcttcagatgatcaaactactccgagatacaggaggaaattcaaaccaaaggcaaagaagttaaaaactttgaaaaaaatttagacgaatgtataactagaataaccaatacagagaagtgcttaaaggagctgatggagctraaagccaaggcttgagaactacatgaagaatgcagaagaytcaggagctgatgtgatcaactggaagaaagggtatcagtgatggaagatgaaatgaatgaaatgaagtgagaagggaagtttagagaaaaaagaataaaaagaaatgaacaaagcctccaagaagtatggaactatgtgaaaacaccaaatctatatctgactggtgtacctgaaagtgacgggaagaatagaaccaagttggaaaacactctgcaggatattatccaggagaacttccccaatctagcaaggcaggccaacgttcagattcaggaaatacagagaacaccacaaagatactcctcgagaagagcaactccaagacacataattgtcagattcaccaaagttgaaatgaaggaaaaaatgttaagggcagccagagagaaaggtcgggttacccacaaaaggaagtccatcagactaacagcggatctctcggcagaaactctacaagccagaagacagtgggggtcaatattcaacattgttaaagaaaagaattttcaacccagaatttcatatccagccgaactaagcttcataagtgaaggagaaataaaataytttacagacaagcaaatgctgagagattttgtyaccaccaggcctgccctaaaaaagcttctgaaggaagcactaaacatggaaagcaacaaccagtaccagtcactgcagaatcatacaaaattgtaaagaccattgaggctaggaagaaactgcatcaactaacgagtaaaataaccagctaacatcataatgacagaatcaaattcacacataacaatattaactttaaatgtaaatggactaaatgctccaattaaaagacacagactggcaaattggataaagagtcaagacccatcagtgtgctgtattcaggaaacccatmtcacgtgcagagacacacataggctcaaaataaaaggatggaggaaaatctaccaagtaaacggaaaacaaaaaaaggcagggtttgcaatcctagtctctgataaaacagactttaaaccaacaaagatcaaaagagacaaagaaggccattacataatggtaaagggatcaattcaacaagaagaactaactatcctaaatatatatgcacccaatgcaggagcacccagattcataaagcaagtcctgagtgacctacaaagagacttagactcccacacaataataatgggagactttaacacyccactgtcaacattagacagatcagtgagacagaaagttaacaacgatacccaggaattgaactcagctctgcaccaagtggacctaatagacatccagagaactctccaccccaaatcaacagactatacatttttttcagcaccacactacacctattccaaaactgaccacatacttggaagyaaagctctcctcagcaaatgtaaaagaacagaaattataacaaactgtctctcagaccacagtgcagtcaaactagaactcaggattaagaaactcattcaaaaccgctcaacaacatggaaactgaacaacctgttcctgaatgactactgggtacataacaaaatgaaggcagaaataaagattttctttgaaaccaacgagaacaaagacacaacataccagaatctctgggacacattcaaagcagtgtgtagagagaaatttatagcactaaatgcccacaagagaaagcaggaaagatccaaaattgataccctaacatcacaattaaaagaactagaaaagcaagatcaaacacattcaaaagctagcagaaggcaagaaataactaaaatcagagcagaactgaaggaaatagagacacaaaaaactcttcaaaaaattaatgaatccaggagctggttttttgaaaggatcaacagaattgatagaccactagcaagactaataaagaagaaaagagagaagaatcaaatagatgcaataaaaaatgataaaggggatatcaccaccgatcccacagaaatacaaactaccatcagagaatactacaaacacctctacacaaataaactagaaaatctagaagaaatggataaattccttgacacatacaccctcccaagactaaaccaggaagaagttgaatctctgaatagaccaataacaggctctgaaattgtggcaataatcaatagcttaccaaccaaaaagagtccaggtccagatggattcacagccaaattctaccagagggacaaggaggaactggttccattccttctgaaactactccaatcaacagaaaaagagggaatcctccctaactcattttatgaggccagcatcgtcctgataccaaagcctggcagagacacaacaaaaaaacagaattttagaccaatatccttgatgaacattgatgcaaaaatcctcaataaaatactggcaaaccaaatccagyagcacatcaaaaagcttatccaccatgatcaagtgggcttcatccctgggatgcaaggctggttcaatataagcaaatcaataaatgtaatccaccatataaacagaatcaaagacaaaaaccacatgattatctcaacacatgcagaaaaggcctttgacaaaattcaacaaccctgcatgctaaaaactctcgataaattaggttttgatgggacgtatctcaaaataataaggggtatctatgacaaacccacagccaatatcatactgaatgggcaaaaactggaagcattccctttgaaaactggcacaagacagggatgccctctctcaccactcctattcaacatagtgttggaagttgtggccagggcaattaggcaggagaagggtattcaattaggaaaaaaagaagtcaaattgtccctgtttgcagatgacatgattgtatatctagaaaaccccattgtctcarcccaaaatctccttaagctgataagcaacttctgcaaagtctcaggatacaaaatctatgtacaaaaatcacaagcattcttatacaccaataacagacaaaccgagagccaaatcatgagtgaactcccatacacaattgcttcaaagagaataaaataactagaaatccaacttacaagggacgtgaaggacctcttcaaggagaactacaaaccactgctcaagaaaataaaagaggatacaaagaaatggaagaacattccatgctcatgggtaggaagaatcaatattgtgaaaatggccatactgcccaaggtaatttatagattcaatgctatccccatcaagctaccaatgactttcttcacagaattggaaaaaactacttgaaagttcatatggaaccaaaaaagagcccgcaacgccaagtcaatcctaagccaaaagaacaaagctggaggcatcacactagctgacttcaaactatactacaaggctacagtcaccaaaacagcatggtactggtaccaaaacagagatatagatcaatggaacagaacagagccctcagaaataactccgcatatctacaactatctgatctttgacaaatctgagaaaaacaagcaatggggaaaggattccctatttaataaatggtgctggggaaactggctagccagatgtagaaagctgaaactggatcccttccttacaccttatacaaaaattaattcaagatgaattaaagatttaaacgttagacctaaaaccataaaaaccctagaagaaaacctaagcattaccattcaggacataggcatgggcaaggatttcatgtctaaaacaccaaaagcaatggcaacaaaagccaaaattgacaaatgggatctaattaaactaaagagcttctgcacagcaaaagaaactaccatcagagttaacaggcaacctacaaaatgggagaaaattttcacaacctactcatctgacaaagggctaatatccagaatctacaatgaactcaaacaaatttacaagaaaaaaacaaacaaccccatcaaaaagtgggcgaaggatatgaacagacacttcttaaaagaagacatttatgcagccaaaagacacatgaaaaaatgctcatcatcactggccatcagagaaatgcaaatcaaaaccacaatgagatagcatctcacaccagttagaatggcaatcattaaaaagtcaggaaacaacaggtgctggagaggatgtggagaaataggaacacttttacactgttggtaggactgtaaactagttcaaccattgtggaagtcagtgtggcgattcctcagggatctagaactagaaataccatttgacccagccatcccattactgggtatatacccaaaggactgtaaatcatgctgctataaagacatgcacacgtatgtttattgtggcactattcacaatagcaaagacttggaaccaaccaaaatgtccaataatgatagactgaattaagaaaatgtggcacatatacaccatggaatactatgcagccataaaaaatgatgagttcatgtcctttgtagggacatggatgaaattggaaatcatcattctcagtaaactatcgcaaggacaaaaaaccaaacagtgcatgttctcactcataggtgggaattgaatagtaagaacacatggacactggaaggggaacatcacactctggggactgttgtggggtggggttggggggagggatagcattaggagatatacttaatgctaaatgacragttaatgggtgcagcacaacagcatggyacatgtatacatatgtaactaacctgcacattgtgcacatgtaccctaaaacttaaagtataataataaaaaaaagaaaaatacatttcatgagaaaaactgtaaaaagacacaaataagcttactatataatggtaatggggtcaattcagcaagagaatataacaattttaaatgtatatgcacccccaagtggagcacccagatatataaaggaaatattgttaaagagaaagagaaagatagacccaaatagaataatagctggagatttcaagaccccactttcagcattggacagaccttccagacagaaaatcaatgaagaaacatcagacttaatctgcgctatagaccaaataaatctaatagatatctacagaacattttacccaagagcttcagaatacacagttgtatcatcagaacatggatcattctcaatgatagaccatatgttakgtcacagaacaagtcttaagatattcaagaaattgaaataatattgagaatcttctctgatcacaatggaaacatactagaaattaataagggttgggcactgtcctcacacctgtattcccagcactttgggaggctgaggtgggcagaccacttgaggtcaggagttagagagcagccttgccaacatggtgagaccctgtctctactaaaaatacgaaaaaaaaaatagccatgctggtgtcacgcacctgtaatcacagctacttgggaagctgaggcatgagaatcgcttgaatctgggaggcggaggttgcagtaaaggcgagatcataccgctgcactctagcctgagtgacacaacaagactccatctcaaaaaagtaaataaataaacaaataaaagaaattaataatgagaaattttgtaaactatatactgtatgaataaataaaaattaaacaatatgttcctgaaggaccagtgggttaatgcaggaattaagaagtaaattgaaatttttcttgaaacaaatgataattgaaatacaacatatgaaaacctatgagacacagcaaaagtagtactaagaggaaagtttatagctataagtkcctacatcaagaaagaagaaaaacttcaaataaacaatctaacagtgcatcataaagaattagaaaaggaagaccaaaccaaaccgaaaatttgtagagcaaaagacataataaagatcagagcagaaataaatgaaattgaaatggaaaaaaagtatgaaagactaatgaaataaaaacagggtcctttgaaaaattaaataaaactgacaaactttgagccagactaagaaaaagagagaagatccaaaaaaataaaattagaaataaaaaaggagacattacaactgatactgcagaaattcaaaggatcattagtggctaccatgagcaattatataccaataaagtggattttttttttgagacagagtctcactctgtcacccaagttggtgtgcagtgacatgatctcggatcactgcaacctccacctcttggggtacaggaattctcctgcctcagcctcccatgtagctgggactaccggcacacgctgccacatctggataatttttttcttctttccgtattttagtaaagacgaggtttcactgtgttgcccaggctcgtctcgaattcctgagctcagtcaatccacctgccttggcctcctaaagtgctaagataacaggcatgagccaccgtgcccagcctacgtaccaataaaatggaaaatctaaaacaaatggacaaattcctagacacatataacctactaggattgaaccaggaagaaatctaaaaccctaaccgaccaagagcaagtaaygagatcgaagctataccaaaatctctcagtaaagaaaagctcaggacctgatagcttcactgctgaattctaccaaatattttaaaaagaatatcaatcctactcaaactcttctgaaaaatagaggagaaggcagcaagctaacacaggaacagaaaaccaaacaccgcatgttctcactcataaatgggagttgaataatgagaacacatggatacagtgaggggaaattcatacaccggggcctgtcagcaggtgaaggcctaggggagggacagtgttaggagaaatacctaatgtagatggcaggttgatgggtgcagcaaaccaccatggctcatttatacctatgtaacaaacctgcgcattgagcacatgtatcgcagaacttaaagtatataaaaaaagataaacaattccaatagaaaaatgggaaaatgtaaaaaaaaaaatagagaagggaatacttccaaactcattctatgaggcaagtgttatcctggtactaaaaccaaagacatatcaaaacacagaaaacgatagtccaatatctctgatgaatattgatgcaaaaatcctcataaaaatattagcaaaccctagtgaaagtggacacccttgttgtgttccagatcttggaaaaaaggctttcagcttttccccattcagtgtgatagtagctgtgggtctctcatatatgtcttttattctgttgaggtacgtttcttttattcccagtttgttcagaggttttattatgaaggaaagttgaatcttatcaaatgcttttttgccatccattgtgatgattatacggtttttctctttcattctgttgatatagtgtatcgcattgattgttttgcatattttgaactatgcttgcatcccaaggatacatcccactcagtcatgatgaataatctttctaatgtattgttgaatttggtttgctagtgttttgttgaggatttttgcatcaatatatacacctactctgcacccacaaaaattattaaaaagaatttttaaaggaccaaaaaaagatagacaattcagttggccaacttccaaagaattgtatgacataatatttggacactgccacaaactccatacatgtgaaggacacaattactattgtatggttcctggacgtaccatcttcacttctgtagaactatagaaataagtgggtgacaggtgggaaaagatttgtaagttatgttaaggagtttctaaatcatcacaggggagatgtcaagccactggaaagttagaactggaaaaacatggtggagaggaggatgtctcttattgggatgcacaaaagggatgatggacatctgagctagcataatagcctattgagatgagaagagatacatagatttgagataattcaaaggtagagttgacagaatttgatcattgattgagaaagagtgagaacattgacatctaagtttctggattgatcctctagaagcaacaataatcttaattctttcaaaggaaatcatatgcaaattggtagttgacattttgcttgaagtctttaatataatattttcatgattgtaaaaccaaatgactctccatatttatgaatgtgcttacttttgacagaattttcataggctcactccttctaaactcagttcccttaactctcttcgcatgagatcatatgtttctcaataacaaattctgcagtaggggctattaggtgcccaaccccatctccacttttcactcatgcttcaggaagaacagtttgctatttaccagggaagtcttttaaagctgctatggacattcagctaaaggacactgagaatgtaactaagaaattcaatgatgtcttcaagttgcctgactataggttttkaataacaatgacctacacttattgagagattaacaatacgccaggtaccttctaacttctaagtatactgttacatttggtcctcacaacaattckatgcggtaatcattactattatccacattttatagagcaggaaattgacatagagatagcacaaayagattgctcaaaattacacaagatgaaaatagccgactcagstttaaggccacagaacttgtgccaagagctctcacgtgagatatacaaacaaagattccttttctaattgccatcagctatttgagaccatattatctgccagtttccttgttgatctagaagcctctttaatcattaactacttccccagaggctctgtctccaaatacggttacattgagggttaagtcttcaacctgtgagttttgagggaacacagtatagtccttaaaagttgctctctgttcccaagctgagtgctaagatctttcctcaataatgaattctttttttgcctaagtcagccagagaagtgcttttaaccaacaatgctaatgagtaaagtatctatatatgatagcaatatatttggtatcctttatttgatgaaatcatttatttgatgttcctttcatttgtacatgtaatcaagaatcatttagtcatttattcaaacatagttttaccactgccatttaaccacctgtgtgactttagagaaattcatctaagtaacagttcccttaactataaagtatagacaattatactgaccccaagattgtttgaaggatttggggttatatgaatctatataattattaaatatcctgacaaatacagttgacccctgaacaacacaggtgtgaactgcatgggtccacttatggttggattttttgcaataaatacagtcaatagtccatattggtaggttccacatctgcaaccccatgcagattgaaaatacagtatttgcaggattcaaaacctgtgtacacagaaagctgattttcctaatggcaggttccacagagccaactgcaggacctgagtatgagtggattttagtatcattggggatcctggaaccaattcctccaggatacggtgggatgattgtagtattaactggcagtatcatatgtttgggtgggctctgacacctttttaaaaaaagatggccaggagaaaaaaaaatgaatatttaatttttggttttcaaaactgtgactgtgaaacaaagctaattccttctttttttcatagtgaatatgttttttaatcattaactatttctttacaaatgaaaattgtatatatttattgagtacaacatgatgttttaaaatatgtgtacattgttaagtgacacagtagagctaattaatatatgcaatatcttataaacttttaatgtttggatgagaacacttagaatgtattctcataacaattttcataaaagtatttttaaacatagtcaccatgcgatacattagatttattggactgctcctaccatctaactgaaattttgtgtcctgtgaccatctccccaatccctaccacctcctgcaacctctattaaccactattatactctctgcttccatgaatttaactttttccaatttcacacgtaagttacataatgtggtattcgtctttctgtgcctggtttattttacttaacacaatgtactccaagttcatctatgtggtttcatatgactgaatttccttccttttaaaagctgaatcgtattctattatgcgtatacaccacatttttaatgttcataaatctgttgatagaaacttaggttgattatatgacttggatattgtgaataattctacaatgtacatagaagtgcagatatctgtttaacatacaggcctatctcagtgattttgaggattcagttccagacgactgcaataaagtgaatatttcattaaagcaagtcacacaaagtttatggtttccccgtgcatataaaagtcatgttcacactgtactgtagtctattaggtttccaattgcattatgtttttaaaaagtacctatcttaatttcaaatactttattgttaaataatgcctaggataatctgagctttcaaagagttgtaatctttttgctggtgcaaggtcttgtttcaatgttgatggctgctgaccagggtgggacttgctgaaggttaaggtagctaaggtaatttcttaaaataagacaacaaacaagtttgctgcattgattaacacttcttttcacaaaagatttttctgtagtatgtaatgctgtttggtagcattttacccacaataaaatttcactgaaatttggaatcaatcattttaacccctgctactgctttatcaactaggttgatgtaacattagaaatcctttgttaccatttcagcaatgttcacagaatcttcaccaggagtagcttctatctcaagaggtcattttctttgctcatccataagaagcaatttcttatccattcaggttttatcttgagattgaagcaattcagtcagatcttcacactctacctctaattttagttctcttgttatttccaccacatctgcagttacttcctccatttaaatcttgagtgcttcaaagttatctgcaaggattggaatcaccttcttccaaattcctgttgatgttgatagcttgatctcctcccatgaatcatgaatgtttttaatggcatatggaatcgaaaatccttccaagaggtttccaatttactttgccctaatccatcagaaaaatcacaatgtattgcagctatagccttacagaatgtatttcttaaataataagaattggaaagttgaaattactccttgatctatgagctgcagaatgaatgtatgttagcaggcatgaaaaaaatatccttttacatctccatcagagctcttgaatgaataggtgcattgtcaatgagcagtaatattttcataagaatatttttttcctgagtagaggtctcaatagtagccttaaaatattcagtaaaccatgctgtaaatagatggtgctgtaatctaggcttcgttcttccatttatagagcataggtgaagtctatttaccataatccttaagggccccaggatttttggaatggtaagagagcattggcatcaacttaaagtcagcagctgcataaactgctaataagaaagccagcctgtcctttgcagctttgacggttggaattgacttcccctttctagctgtgacagtccttgatggcatctccttccgatagaaacctgtgtcatctaaatgggaaatttgttgtttggtgtagccacctccatcaattatcttagctagatattctggataacctgctaccgtttctacatcagcacttgctgcttcccttttgyacttttatgttatgaaaatgggccaggcacggtggctcatgcctgcaatcccagcattttaggagactgaggttggtggatcacctgaggtcatgagcttgaaaccagcctgaacaatgtggtgaaaccccgtctctactataaatacaaaaaaaaagtcagccagctgtggtagtgggagcctgtaattccagctactttggaggctgagggaggagaatcacttgagcccaggagcagaggttgcagtgagccctgatcgcctcaccactgcattccagcctgagcaacagagtgaaactctgtctaaaagaaaagaaagaaagaaagaaagaaagaaagaaagaaagaaagaaagaaagaaagaaagaaaagaaagagaaaatggcttctttccttaaacctcatgaactaacctctgctagcttccaactttttttctgcagcttcctcacatctcttagccatcaaataactgaaaagagttagagtcttgctcgggattaagctttggtttatgaatgttgtggctagtttaattttctatccagagcactaaaactggctccaaaacagcaataaggctattttgctttcttatcatttatgtgtacactggtttagcactattaatttccttcaaagatttttccktgcactcacaacttggctaactgtttggtgcaaaagatctagttattggactgtctgagattttgacctgccttcctcactatgcttaatcatttttagctgtttgtttaaaataaaagactcgtgacccttccattcacttgaatacttatagatcattgtatggttaataattgatgtgatttaaatgttcttgtgtctcagggaatagggaggctggaagagagggagagagtctgggaacggtcagccggtgatgcagtgagaacactcacaacagttatcaattaagtttgctgtcttatatgggtgcaattggtggtgctccagaacagctaaaatagcaccatcaaaactcactgatcacagatcaccttaacagacacaataacaaggaaaaagtgtgaatattctgggaatgaccaaaatgtaacacagacaggaagggagcacatttgttggaaaaatggtgccagtagacttgcttcatgcaaggttgacacaaaacttctatttgtaaatagaacctttatagtacctctgaagtatgataaagtgaagtgcaataaaatgaggtgtgcctgtactgatttcatttcctttaaacatatatgcagtagggattgctggatcatatgttagctctatttttagctttttaaggaayctctgtactgttttgcataaggctgcaatagcttacgttcccaccaacagtacacaagggttcccatttcctcacattctccccaacagttgtgatctttcatcttcttgataatagcaattctatcgagtacgaggtggtattttggttttaatttgccttttcttgataatgagtactgttgagcattaggaaaaaaaaaacccttagttatttatatgtcttcttttgcgaaatgtctattcaggatggcggtgggaagctagctgcagccggctggggagggggtgtctgcacaccagagagtagtgtgctggatgattctggcacccggaatagcctcctcctcctcccactgcctagacctggagaagccccttctcatccttctcacccatccccttgtggcagggcaagtgggctgagctgccccatgcttgcacagcccagagcccgaacctgcaggacaagtgctgcagagtgaacttcacctcctttccagggctcacgtgtgagccactaccctaggttgtgttgatgtcttattgctgtttctccaaaactgtaataagaccatttttctacttatcattcctgtttacactggactagtacttttaatttccttcaaaattttttcattgcactgaaatctgtttttgtattgacatcctgactccagacttgcctttccaaatctagataagyatagtgaccattccccataaccaagatccctttctcactgttgcctctctcctgacatacctgctgccgtattccctactcttccccctcctcaagaaaataaataaataaaaaataaaataaaaaaagcaaaacaaaactacaaacaaaaaatagcttactcaaggaattaggtaggtagggaatgatggatcacattggagtctgggattaaaaacacacacaaaaagaaaaaagttaaaatgcacttgttttctctacactggctaagaatattgctctacagtataaattttaatgtcatgtgtctgaatgtagtgtgcatttgagtagcattgtgtgtgagtggctccacaagtaccttctagtgcagcccctcagtttaaagaagaaagtggggggaaaaagaaactccagaaagctttaatgttcttgagtgattcctttacctaatgagcatggttttaacaactggagatgagcctactttggaaacagcccctcttaccccatatttattcttagggcacccctttatccactccatgcccattatgtctcattctcaagtggcaatgagttaactagaaatttaaatattttctgtaactttacacttagattatgctttgttatgaatttttacacccttcttctcttaaagatgcagaattgggctttaaaaaaaattattggmtcaaataagcccttccccttccacttgtctctcgggaatgtgagctgatggttcttaagatgttgagttttgtttactattcactgctctttagccaggaattctctagtgatcagaagcaatgcaactgaagaccagtttttaaattatgtgttgacatgttaccttatatttaaaaaggaaaaaaaattagctggcttatattatgccagatgtcagtaacatgaagtcctaatttattgttctcagttgttttcctacctaatgtgaacttccgtgtccctgagccctcaggagtacctacagcttatggtgcaatgtcttctcccaaagtgttggccaccatttcacccaaggccctcttccaattcttgcttatctgagtcagatttagagagtaccactgtctccccttatcccttacttcatctccaaaccacatactcgtgctatacttttcttctcagtacctctccctgaatgatgagctgccattttaggaaattggaccagataccaatttgggagctttcagtcaaacagcctcaaacccatttcttcctatgaaagggtgcaagtctctgaagctctcactcacccctgtagtctgtgtagaaaatgtacttaatccccctggccccctactgtcattgcctttggtgtgagatrttccctatttcctagtttagtttgagtccctctctcctctgctagccaacacccatccagcaataaggaaccaagcgacagcctcctattcacactccctgccccctttccacactaccctagggaatacctggattgccccactctgtccacatactgtagcattcattctctatcatcctctcacctgtggtggtttatggatgtgatagagtttttaagattactacaaactagtaaagaggaaaagcaactcaaagagagagaaagagagaaagaaagaaagatctgttcagggtctttgcccatttttaatttggattatttgttttcttgctattaagtttattattattttaaaaattaaccccttatcagatgtatggtttgcaaatattttcttccattccataggytgcctcttcatcctgttgattgtttctttgctgtataagactgttttagtttgatgtaatcccatttgtctattttgcccttcattatctgtgctttagggattctatccaaaaatcattgccacaactaatatcacaaagcttttctcccatgttttgtcctagtggttttgcagtctcaggtcttacatttaggtctttaaaccatctggggttgagttttgtatgtggtgtgagataaagtctaatttcaattttctgcatgtggatatgcagtttttttcaacagcattyattaaagagactgtctattccccattcacgtgttcttgacaactttgtcaaaatcaatcatcttaaatgcatggatttatttctggacgttctattctgttccattgtttcatgtttctgttttgatggtagtacaatcctgttttcattactattgctacatagtacattttgaaattaggtagtgtgatatctccagctttattcttgttgctcatgatcgattttgctcttaaggatcttttgtgataacatatacattttttggtgtgttatatttctttgaagaatgtcattggtatttacataggaattgcattgaatctgtaaatcrcttggggcattgttgtcattttgacagtattaatttttgcaatctataaataataaatasctttctatttatttgtgttttcttcacttttttcatatatgtttcataattttcactatataagtcttttaccacgttatttacatttactcttaagtatttattttttgtagcttatgcaaacaggatttttttctttgtcaggtctttcattgctagtgtatggaaacactactgatttgtgtatgttcattttgtatcttgccacattacggaatttgtttagtagttttaacctagtttgctgcagtctttaggattttttacatataagaccatgctatatgcaaacagggacatatttagctacttcctttccaatttggatgctttttatttttttctcttgcctaattgctctgagtagaacttccattaatgcactgaatagaagtagtgagagtgagcatccttgtcttgttcttaatcttagaaatatgtttttcacatttcaccattaagtgtaatgttagcggtggatttatcataaatggtctttattgtatgagctacattccttctatacctcatttgttgagagttcataatcaggaaatcatggtgaactctatcaaatgctttttctgcttctatcaagtatcatatggattttgttgtttattctgttgatgtggtatttcacatttatagatctgtatgttgaattatctttgcaaccctacgttaaagcccactgtatcatgatgaatgaactttttgacatgytgttgggattagtttgttagtattaatatttattgatgcacctatgttcattagtgctattgcctaatattttcatttgttgaagtgtccctatctttggtatcaggattatgcttgccttgtaaaayaactttggaagtattccctcttcttcaattttttggaaggcttttagattggattgacatgagttcttctttaaatatttggtgaaattcagcagtgaagccataaggtcctgggctttcctttaatggaatattttttattactaatttaaccaccttactcattattggtctgtttagattttcaatttcttcatcttggtggggtttatgtatctaggaatttacccatttattgtagattatccaatttgttggcatataatttgtcataatagtctcttctgatttttttgtgatgtaagttgtgatgtctcctttttgtttatgattaactttttttttcccccttagtctggataaaggtttgtgaatcttatttaacttttggaaagatcaaatttcagggtttttttttttcattgttttcatagtttctatttaatttacctgccccaacctttatttattccttcattctattacctttggacttagtttattctttttatacctccttgaagtgtaacattaagttgtttaagatctttcttctttttcagtgtgaaagttttgaggcatctaacaagttttggtattttgagtttccatttttgctgttctcaacatatttttaaatttccattttaatttcctctttaatccatctgttgttcagaagcatgctgtttaattttcatgtatttgtgagttttctaaaaaattttcctgttattaatttctagtttcatgtcattgtgatctggaatgataaatggtatgatttcagtcttcttaaatttattatgacatgcyttgtgtcctaatatttgttctctagcatttcctgtaagacagctctgatggtaataaactcccttaatttttgtttttctggcaaagattttaatctytccattayttgcaaaaaacagattttcccgagaatcgtatttttggttgacactttttttttctatagaacattgaatatatcattccatgctctcagcctataagtttctcctcaaaaatctgctattagccttcttggaactcccttatatattatttgcttgttttctcatttatttccagaatcttccttttctttgatttttgacagtttaattaaaatatttcttgtactcttgatgggactgaatcatatcaaacatcttcaatattcctatacctgtatatttctctttccccagacttggaaagtattctgttattatttcatcatataagatttctttccctatgtgtttctcttctctttctgggacacacatgatgtgtgcattggttctcatactgatgttctataattgccataggatgtctttattttttctcatttttttccttttgtgtctctgacagtaaattcaaatgatgtgtctttgagtttattgattctttattctacttgatcaaatctgctttcaaagaagtctatgaaattttcagttsaaccrtygtgtcctttatgtccagaatgtctcttttttaatgatttctttctgtttgttgaactttctattttgttcatgtattatttctctgattctttttagtcatctatctgtgttctcttgaagctcactgagcattttaaagaccattattttaaattcactgtcagaaagttcataaatctttatttttkggggtcagctattgggtattcttttttttcctctggtggtatcatttttctcttatatttcttgatttttaggctgtgcattggtgtctgcayatttgaaaaacaagaaagttattccagtctttgcatactggctttgtctggaaaaacctttccccagtcatccagcaattcttggtagggtgtctgttgtggtgtgcaggtgaacttgttgctgaagtcttcaggcaggctggcctggtgtctgtgtcagcaggtggtaggcttggttcctgggtctgtagagttgggcctgaatcctatatccactggctggatattttcattgggtatgtggggatgaacataaagcctatgtctatcagggcaggcatacagcctgtaccagtaggggctggaatgaagcccatgtctacaggggctgacatggctctgatgtgggcattgaacctgtgtctacaagggctggctaggttgtggaatgggcctaattaaggacattaatatgaacgaagcatcccagagatccttgacacattgtgagaatacacagagggagcatctccaccagcctcccacagacactcagccatgcagtccccattccctgccatgagcaacagtttcaaggcttcacaggggttcaaagatggccagcttattgccactctttgtagtatgaagtataccaaaaaataaagatagatcaaaacattgataatataatggctttaaaatctgtgtattttataaatgtatgcttacaaccacaaaaatgccatgcaatactgttgttctactcacaagatcagtacaggaattataaagcattgattcagggtygacttctgccagcatgtaactratggtgaatgtgttctcttcattctgcctgagtttcaatgggtgatatcattggtgatacagctggaatctcatatttgggaccctttttgaaagtggggccatgcctaaattgtatcctaggtgtctactccaccatgaccccctgaaggacctgtggtttcccaaaggttggaagaagattcagggctaagcagttggagagacctagaatcagagatctctcacacagactgaaaaccccaaaactgattagcataacctcagcacmaktaaaaccagaattcattgcttccattcagagatcccatgtttgtgccagaatccaagctgcmatgagtgtttcgggaagtcacttatgactaatactgagtatgatgggactgatatcagagctgagctaggcccagagggcccagaagcagtgacacagaaggctaaacctttcagttttgatccatagattagctacatcagagaagtggacttggagaatcccctgctggagtcttgcagagtaaccactctgtcagatagcatgtgtttctgggaggaagtcataggggtctagttccgccttatacccctgcacaccataagcaygggctgagatctagagagagtccagagctggtctgaaaggctgatacaaaggagtctgctctggaactgaggtattctaagaacttggctatctcagcagccctacagatgggagaggagcccacagatgggagaggaagctattctcctggccaaggtcctgagacagtttgacagaagcctaggcagacttgaggccgactgcagctagcactggcactcgaaatgaaacctcccctgtagtcccatggatagttttttgtataaacatagaaattgaccattctggtcttaaagcttgaaacttttatttgttttctatgagtttcatccttggtaaaggacccctaggtccctcaaaaagtataaaagaactgaaattcaccagatgattccatccagatgatggcacaccagacccctcatayattatgattgcttccttaggtctcctgagttcctgtttttctacacatggttacwtttcctccctgctatgtaaactcataattttagctggtcagggagatggatttgacactgaactaccatctcctctcctacagcatctgattcagccttctcccttggcaagaattgttgatatgaattggttttctgtgcagtgagcagctggagctagaccacacccctggtgtttcactaacagattttgattccccaaccaggaacactttggctcagctaccatgggcggggaatctcaaagtcctcctaagcagctgcttacccaattttggctagagatgagtaccctctctctagggccagccacagctggccccaaccatgttcctgattgccttgggagaactgcctttgaaatttgatatttgcatccagataggtgactctcctctgtgggcccagacagaaagatctcctcctcacagtttgggaaatttttaaaggaatttccacttgcaggttgaacaagcccaattgatgaagagagggaagtaccctgactatttcagtacggmcactcttaggagcttgtttgtcattgtgtgtgtatccaggcaagtgagtgtcatttgtgggaaccagacagtgggatcwgctcctctccatctgagaaattctgaaggaatttttatttcaggtcgattgagcccaaccaatggagagaggaagcaccacaactctttcacattgtagacttttggggcttgtttgatgctgcagcagttggattgtgttttagtaattgtttgcatgtgtctgatacagtcatgggaaattcgaatttgataaactggtactcttttgtgacactgtttggctccagtatagtttggaatctggagtttgctgttgaatgggaaagtgggmttttgtgctgctgttttaagcagggtcrggccargttaatatgtgatgatctcatgcggtgccgtttttgaccccagtgttttgggagtatagggagttttggcctttaaaaatcaaactgccacagwaactcmttttatttaaaatttgkttcacagccttccctggattacctatcaaggctaacaaagttcagccatgtggacatgtttgcagacagttgagactgtattactatctcatggctagagttccaaggtaaaagcttttggatctttgtgtgtatatacatctagatgtgtttatgtgtatgcacatgtattacattatatgttgtgactaccaaattggcttatacataaaagaacactcctagattaagtaaataagtccaaagtattttttacattcacgttacttaagtaaatttttaagaagctagcattaaaattattgtaagataaaaatagaaatgtcttcagaattgtcagcatacattttttcggggttttatgtttgtctctgctagatattttggggyatcagagtgtggcacagaaagttataaaactataaccagtagtttgagaccagtctgaaaaaygaagacccccccccgccccaccatctctataacataaaaataagacaattagccaggcacattgattcatgcctgcagctagtcaggagactgaggtgagaggatgcttgagcctgaaaggtcaaggttgcagtgactcatgatccagccactgcactccagcctgggtgacagagtgagaccctgtcaaaaaagaaaaagataagaggcagagaatgacaatggggcacaggagcattgcagagaaactaggggaacagttgtaattgttaatasgatggtcagaggaggcctcattgagcaagtggctttaaggtgaagatttaaagagggtaataaggttttctataggtataatgagaaaacagaatgcaagcagaagaaaaaggacagcaaagtgcctgaagcagagaaggcaaagagattgaagtcagggacatgactggagggatgtcagggaggtgactggattctaagtcatggagaacttagasggctgttataagacttttatatatctttctctgaatgagattgggagtgacagcaggacttgcacaacgaataacaaaatgtggcttttgttttaaaaggagtgttctggttttacatagagaaaagactaaagacattctccatccagaaaagactgccaagaactctgaagcatctaaaagtttacaggggcacagatgcagaaatgctggcagatgacacaagcttccaggtaaaggcaggattttatatgccttcaacaggcagaatgatttatatgtttgtgtcagtcatctttgctccacaagtcctacagaggaaatacaggaaggcagattaatgtcacaaattcaatrgatgtgtgttgcagcaaaactgccttctgcttcagaagaaagcagtatctccagcttccaagctgtactctttacaaacatccttgaaaggataggagcaaaggctgtcaatgtctctgctcctaagacatgcagaaatgtgagaggccatgaagacttttctcccaaccagaatgagcagaatgtcataatggattggatgtaaagtgggaggggaaaagatacttaagaataattccaagagtttttatttgaataggtgaaaaggtggagttgccatcaacttaattgagaaagactacaggtgaagtaggctgggtggagagggtggataaggagtttgatctgagacataatgagtttgagatggctattgggtggaatccaagagatatcaaacaggctattggatacatatgtcttgagtttggaaaagagttttaatagtaatataaatgtattagtcattggcaagcagattgattttaaagccatgggaacagatgtgattactagggagtaagtgtggatacaaatgaaggccaatgattgaactctaaagtgatgcaaaattaagaagttggggagaaaagaagggtccacagaggagactgagaaataaccagtgaagttaaaggaaaagaagagagtgtgttttctcggaaaccaagtgaagaaagtcttaaagaatgatctattaagaacagaagcaataattgaccactggatttaataacatagagatcactgatggatttaaaaaatgtttcagtaaaatggtagcagcaaaaacccagttagataagattagggggaggattggaaatagcatttgtagacaatcctttcaatgaattttgctacagagtgttaaagcaaactaaatatggtctgagaaggactctgtgcttcatttgagcccttgtgggtgtagagtaacctagcttaatagacaaaattgaaaacctaatttaggagtctgcacctgtaacaatatttgaatgctggccagtcccagcagccttacatcaccactcatagactgctgaatgytcaaactgtgtttaaataaggcaaacgcccaggtgacagaaatctcactgtttctgtaactcatttccggttcctggatgtcactttaactttttttccctataaatttgttttgaccacaaggcacccctggaaactctgtgaatctgctgtgattctgaaggctgctggatcgatgaattgttcattgctcaactaatctcctttaaatttaagtcagctgaagtttttattttatcagattgtgtcagaagcagaatctgaagtggagcttctagtatccccaggagcactgagtaaacacagaaggtacctgcgggatccacttgtgtccactgatctctcagagcagctgaggatcaaaggtaagctccctcttgcattttggagcttcacacatttgtgttttgagctctctgagtttccttgtgcaaatttgtgatccaaactggttttggagttgcaacagaaaatggactgggtctaggaatgaatttgatctgggaattaactggcttggatccacttagaggccactaacagtagaggccactaacagctgactgggtcataaaggaagtggtagtaagcagtaatgtcgcagcagtcataaaattcggctttgggaaattcacagggatttttgtgttctacccatttgtttcatttttcttgtgtacctagrtaggraaattcattggytaagttaatcaaaagaacctgagagtaaagtcagtattttatgtaaaamtggaatccttaatttctgaaaaactgagttctttctggcttatacattaggactggaaggcagagaagtcttacacaaatggcaaaatcttactaaagataacttagagtggaacattccaaatgaaaaacaatgcattgaactacatttaaaaatgagggctctcagtaaagtcccttttggctaagaaccggtttggcactatagaatgtcaactgttatactctttggcacatttgtaagaattccaagtgttaggccgggcgcggtggctcacgcctgtaatcccagcactttgggaggccgaggcgggtggatcatgaggtcaggagatcgagaccatcctggctaacaaggtgaaaccccgtctctactaaaaatacaaaaaattagccgggcgcggtggcgggcgcctgtagtcccagctactcgggaggctgaggcaggagaatggcgtgaacccgggaagcggagcttgcagtgagccgagattgcgccactgcagtccgcagtccgacctgggcgacagagcgagactccgtctcaaaaaaaaaaaaaaaaaaaaaaaaaaaaaagaattccaagtgttatttcaaaggaaatttacagatatgtttccaaattttctatgcttttttcttatttttgtaatgaaactgggaaaaatttcaaaatggttatagatctgaaatatttggccctaagaaactaaagaaaatctttgccaactcctgctctgaggtttccagtcacaactgttcttagatatttcctattccagaagaaagaagactcttcaggcatctgatgaccaaaataaaagaaacattatgatggtggtggtggagtgttctgctacaggcatgtgggargctcacagaactcttaatattcacttttaattcattccaccagagaggaaatgcatgggttttggataggactctgtcrtttatccctgtaagaacttgagaaatttatttagtctctctaagctttggcgtattcaaaatgaagacgatactaacagtacctacatcatgagtgttacttgaatggagatgtgtaaagtgcattttaatttcatctggtcctttaacattttcccttcacttctcttcagagttttttcttgaagggctcgaggactgaagcatcccacaaaatgattctattgaataattctgagcagctgctggccctattcaaatctttagcaaggagcattcctgagtccctgaaggtgaaggaacagtgggaggttggggtatgggagtaggggtgttgaggatgagaaaataacaggcccaagaatctcgtccttcctgactttgtgcagagggttggagctgggaaacaggatggggttggggacaaaggaggcatgttaagagctgctgcttctcctcggcaacaggcaactaggccgactctgcagattttatcactcatttggagaggtggtgaagaatggtggctacgaacatcggtttggggccagattcaataaatatgcattgcaaggctgccattttttagtcagatatcattgtgcctgtgyctttagctttctatgcctttatctttggtcttttcattaataaaatgggaataatattagtagccacctattaaagttgttgtggacactgaatgaatccatacaatataagtgctaagtgcattgtcaagtgcccagctactgcacagtagctctgtggtatcacaaggacacctccctgkgagttctgcctgtttgctggtgacttcaygtccatcagtatggtcctggagatgctgctcatcacactatcaccracttggtcccagtgctgtctcctgacttccatttttctcttcctcttcacatacagacccccatctctggggatctcaacctctcctattccctttcatccctccttcaggtgtatggctctctgtttcacatcaatcacgggaaccccttcaacatggaggtgttggtggactcctggcccgrgtatcagatggttattatccgacctcaaaaacaggtaggcacacagacagggactggtggagccaggcaggtccaaagggcctgaggaactgtccaattcagacaccatggctgctttcatagggtgaaaggaaatgtgagtattttaaaacactccttcgttaatgagcagcttgcatgaatgccacatgttaacactcttcccgtaagcataagactaatttgggaaaggggttcaagggggaaggggaggaaaaggacaargctgacactcacagattaagggccctttgaggtggcaggggtcacctgcaggggctgaatggaggccaatttacagggaaagttgtgtgtctgagatatcagaacagtgatttagaaacaaaaaccaaggsagtagtctaccagcaaaattacctctcatggccaggcatggtgtcttttacctgtaatcccagcattttgggaggccaaggcaggaggatcgcttgaggccaggagtttgggacctgcctgtgcaacatagtgagacctcatctctacaaaaaaataaacaaaattagcagtgcatggtggtacatgcctatactcctagatgctcaggagatggagatgggaggatggcttgagccccagaaggttgaggctgcagtgagccaagatcacaccactctactctagcctggccaacagagtgagaccctgtcataaaaaaataaaagttgcttctcaggaaccagggaaggggcacacaattactgtgtgtcaactgtttggaagcacctcactcattagtgactgtcatcatcagaacaattttacaaagtgagctttaatatcttcaatttagagatgaggaaacaacactgagaaatattaagtcctgtagctgctggataccaactgttaaagcattccccaatctgaattcaagttcaacggactctgccacttttactagctatataaccataggcccttctgtgagttttatcatctgttaaaatgggaaaaattggaggacactcttcagaggatcacagaaggtttaaatgagataccatatgtcaaacacttagtacatagcacataattctaaatagtatttaccataattagccattgttggccgaggaaacacaaggtatacacgattaagctgaaatagtaatacaaacctaggtctattttttggccctaaaggcttcccctttttgtatctgtttcatgcacatctggttagtgaactgaagcctcatggmcagcccagcttcaggtgggtatagacgctgagcccccacataataataagctgagcctaayaccttcccagggatgttcttttgatctcmaggtttcctgacaatttcagatggaagattaatgcttagtttatttgatccatggtccaatttcttcaaagtgtgatatgctaaataactgtatgaggtcaaatagttctttttacttcagtaactttgtagttactatgtgtattttaacaatgtaactgcaccatcaagctgtaacttcatatatgcattgctttgaacaaggctagtttttataaagtgagtcagtaaacaaaaatattaaaatataaaagttccatgccacacatacatgaccaaaaaaatggaaagaatgaaatatgctgcaatttacttggaaatacattcacctagtctgattccatagtataccacgtttctttcagtattgaaaatcratgcaattttgaagaagacctttttaaggtgagatgcaggagaatttctctagaaaaawattaattttttctttcttggttyttaatcagaaagataatatatgctgattatasaagtggaaaaatycaayatgattttaagaagttaataacctctcacctcctttgccctcctctcctccattcctaccctttggggtaatcrgtgtccttgcccatattaacacacaaactgtcatcactttttaatttgcctttgacatatggacattgctttgagtgaatcaatacagcactaacgttttcgttttagtaactgtggtgttccatagagtcaatgcaatgctagtcagtcattctcctcctgttgggttcaaattgttcatacttctttgccattacaaacaatgcttcagtaaacatccttgtatacatgtctttacatcctggaaacttttctcaatgcaattggtttccaaaagggatamgtccaagtaagagcttctcttatcctaagtaggcactgccagactaccttcccaaaggattccacagtattatttccattagcaatttgtggaagaattgtttcccacattctcaycagcactgaatgttatccttcttctamtttctgccaaactggtgggtgaaaagtggcatcttattgtagatttaatttgcatttccctgactagtgatattcaacatatattttcatatgattatcagtcattttgggtttacttctgaactgtttatattgtttgaccatttttacactgggattttgtgtcattcttaaaattctctatgtgttttggatatgagggatactaacacaaggtgtatgctacaaatttgttgcccaattkagaattattttctattttattgatagattttcacatgaagcaatttttaattttcatgtaatcaaatatattatctttttcactatgattcctgaggctttgggggtttttttgttaataattaggaagatttttcctaatccaagatcatacaagttgtttttttcattttgtcttacagtgagtttttacttttgacatttcaaacttcattctatttgsaatatatttttgaatagcatgcattaacattcttttatatttattcaccttatggctggctaattacattagtgctatttattaaataagtcactctgctactgaaacataaatgtctattttgtcatgtaacatttttatatatttttgtagctatttctgtatttgttttagtcttttctcatgctatttcaatgttttgtggtaaatattaatatctaataaagcaaatcacccttcactaatgtttttcttgatttcctatttcttataaacttaagagctatatgaacaaaaactaatttttcagttccccaattcccccaactaagtattgcaattgtgatttgtattggaggagttttttagacaattgtggaagcattaatatttttgtgatactaaatatttttatcaagaaatatggtctttctctcacttttttcagtttctgttctatgccatctggtaaaatattagtgttttcctgaggtaaactacattgttttctgtcgaagtctcttatattttctaaatgtgtaatactgtaatctataaacaaagtaatttgctgcttctttgccaatatttgtatgggtttttagtttcttgccttattgtataatgtacaacctaagaaaacaatatcaaataaccataataatagttctattcttgtctcattcctgattctaatgaaatagctataaacacttacctttaaaattacatttaattctgtctttacaggcttagagcactttcctgttttcccaytttcatagaaattatatttagaatgaacggtaaattttatgttatttcatttttgtctttttatggaaatttatatactcatgtaattttttcctcctttaatttattaccctaaaagatcttctgatcaaactcattctggcctttctaaaacaaactgttcatgttcacattcttttcatatgctactgaatattttattcagaatttttgcatctgtattcataagccaatatggtcagtaactctctttttgttatttctttaccagatttggcattaggatmttttcatctkttaccaaacaatacaattaaaattatgtgtttggttttgycttatgtagaattgaaatgtaaaataatctaattttggctactttttagtttgtaatttcaactttccttttagataaagggggtacatgtgcatatttgttacaygcaaatattgcatgatgctgagtcttggagtacggacagatcccatcaccctggtagtgagcatagtacccgataggtagttttctaacccagcccctttccctccaccctctagagtccatagtgtctattgttcccacatttatgtccatgtatggtcaatgcttagctcccagttatgagtgaaaacgtgatatttgattttctgttacagcattaatttgcttaggattattacactgtggaaagtagtctggaaatttcttagagaacttaaaacggagttgccattagacccagcaatgccattactaggtaaatacccaaaagaaaatgaatcatcctaccaaaatgacacatgcactaggatgttcattgctgcactgttcacaatagcaaagacatggaatcaacacagatccccatcaaaggtgcattggataaaaaaaaaacttgctacatacattcatatggaatactacacagcagtagaaaagaataaaatattgtcctttgtagcaacacggatggagctggaggccataattcttgtccacttttcaaatggtagatgtttaatttcatttctgatatttctattagttcactgaagttttctattttttgaaagtcaattttgatagtttattcttgagggataacatccatttctttatcagtgaatatgttgccttggagtatataatcttctattataagtcttttttcttttctgtttccgttctcatggctcatactctatgcctttttttctcttttctctttctcttctatttcctttaaatgccttaccagaagtttatctctctcttctgctctttctctttttcccatttaataatgaactttctacatttcagtatttatggcttttatttttacaaattgttccattagttattttctggtttactttgatattctctttataattctttgaatatttacttggctattttaagacattcttttaaaatcgggtcttttaaaacttctactcttttaaattcactgaggtgttgtgttttggccatattcaggaacttgcatttataaaagcacccccaaatttttgaaggtttccttaaaattagttacactattttctcttttactccttaacgataaaattttcaacatgatattaatacattcactgctaaaactctcacacttattgtttatatttcccctgataaacagatacacatcgtcccatgaagtttgtggcttgtcagaatgggatcacaagtctctttctttaaaacccatgagtccaacaccacataaattgtgcagagtgctaccgaaaattcagttacttcattctattttgtgggcttytggctgtaaaggccatgtcactcttcaaagaggctgatatcctgtagccttgggaaaaggcaatgtctccttaatgtttctattcactaaagtatcttgctcaaaccctggacactgcagattctaaaacagtatagattgtaggtgtctggtgaaacagtaggcactaaaacttagagaaatcacagttaaattcatcttgtgccaagtttaagaacttaaccctatcaacacggactcagtacaacgcagaatatgtcccacagggggttatgtggggcacagtatatataacagggggatatgtgtggtccaggaggtgagagaagcagggagagaagcaattgttgcattcctttgcttctgctgggcgctctgtgatgctatatataaaataaggtaagtgtgcggttgagtgggtagggagaaaggtgaggcatcttaaggcctggtggaaggtgactgatttcatcctgtctttgttatgcatctgataagcaggtttataaccagtacctgtcagtgttcaatatttaacaaactccagttaaacaggtaagaggtcagcagtagcttataggccttggttctattatccatgtgcccaactgcagccatcgtgggctggtgttaaaattttcctttcaattgtcatttttctaataattgcaatcagtgagaggagaagaaaaagttcaagggaatgacctgacctttcaccatcctacacaggagatgactgatgacatggattcatacactaatgtatatcgtatattctccaaagaccctcaaaaatcacaagaagttttgaaaaattctgagatcataaactggaaacagaaactccaaatccaaggtaacaagtctgaagaaatgggcaagcagctgtgcttctcaaattgtgtcttcaactaacagcattagcatcacctgagagctcattagaaatgtaaattcatagaaactctctgagctgggagaggtggagcaatctgtggtgtgccaaggactatagctgattgtggtgtaaactcaactttgaaaactactaagcactgaggtattaatcaggtgggagcaatgtaagtagagaactgcatgtctgacaatattgctttcttggctttctctcaggttttcaagaaagtttaggtgaggggataaaagcagctgcattttcaaattcagtgaaggtagagcattcgagagcactcctctttgttacggaagatatcctgaagctctatgccaccaataaaagcaagcttggaagctgggctgagacaggccacccagatgacgaattggagaggtacaaaaaacatgtgctgatcatttataattgctattccttgtacatttttgtaattcacataaatcagttttggaatgaagagacgatgaattcattccttgggatgaataaaggttgtcaatggtcaaaatacgccactttgcaatggtgggtcttttaacaagaagagggcctgggatctctagaatggaagggcacctagaaattacaggagtggggatgaaagttgttgtctttctttttgttttctacagcgagactcccaattttaagtatgcccagctgaatgtgtcttattctgggctggtaaatgacaactggaagctagggatgaataagaggagcctgcattacatcaagcgctgcctaggagccctgccagcagtctgtatgctgggcccagagggggtcccggtctcatgggtaaccatggacccttcttgtgaaataggaatgggctacagtgtggaaaaataccgaaggagaggcaacgcgacacggatgatggtgcgatacatgaagtatctgtgtcagaagaatattccattttacggctctgtgctggaagaaaatcaaggcgccatcagaatgaataaggcactaggtttccttgaggcctcctgtcagtggcaccaatggacctgctacccacagaatcttgttccrttgtagacaatgaagctgcttagcaatcttgggcaagccatctcttaatattaaagcagacaccacagaatagctttcttcacttacaaatgttgattgggcatttrtgatatggcaggaactccttctcacatggagacctgatgttaaaggacacagccatgctcttgaggagcttacaatccaagctggaggcaggggagggtatagtctttaaatatgcttaagtgttgtagggaaggacagagttaccaataaacatgtaactagaaagccaggctcagttcttacctctgggaatcagaactctttatgaaacttgattgatagaatctactatctggaagataattgaagaactttaataaaattgtcaatagaatatacctaatctatatggatactttattggaaagaaatacccctgctatgtatagatttatgaggcaatggctatactaaagaatggaatcagtctcttagtttagtgactagcaaggtatcaaaggtgaagcctcagacaaatggctttcctaggctacctttcatcattgttatgcagaaaaggatctccagagaatcaagtgggctggtcttgmggcctctgctatggaaatgacatttgttgtgcctcctttcccctactctttctcacttcctcatcattagtgaagcatggcacaggacaaggtgttgcctgtgagtctggttataaattcagcttttgatgtttgcagcactgctatcttaaggggtcaagggcattccagggagaagagaccactaaggtgaagactggagagtgagtaagagtgagccatacagtaaaagtggaaaaatccagatgatggaaagggcacgtgccatgcactatcataataactttrtaattgaacacttatattacaatctgaatccctgatctcaaaaaaaaaaaaagaaaaatactcttcatgaaaaaaacgtggcctcatttggctctgctctcccaccctgtcattggagcttggattactgtgaacattgtagccacagcaaaaagaaaaaaaaatggcatttttactccttctgatagtctagattttaaaaaaacaaaagaaatcttaatagaattgtcttttggagtaaagtctaccagtattaaacaacacctcatctctccataaaaaataaacctccacaaaattgaatgtttatacttgatgcgatttgaaagtgtgcaattccagcacctaaagaatagtgtaggtcatggagtttttaagaaactccaattcatcttagaaggctatggtagatctgttacatcttagtataaatcaatccaatcagatttctaaactcctgagacctggctgatttgttacattgactgaaatgaaagcatggtctgagagagagagtaaacatgtcatttgggatttcaaagggtggaaaattcttacctaaaaaataaactcaggaacttggagtcatataaaaacagctatattttggcactcaagaggcaaaagctaatacagatgatgaaagaacacaaagaaaataagatttgcctattcaaaatggtgcctcgggcaggtcctgtatccagaagaggatgttcatycagggtctggggctaaggtcatcttagcacagcccagctgccagcttccctcctctgccgcttccctgaacacaagccagcttcccttatctagcccttcttggccctgttaaaaaagtgattcctaaaccttatcatgcacttggattgaaaaaacaacaagaaagcatgggaaagaggaaagaggattccttaaatatggcacaagtaagtccaacattatcaataaacgcactaaaaatgaatggggtaattttcttattaaaatatatgtttttcatactgagttaaaaacaaagtccaaaaagcatacatctctgtgccctcacatggtagagacagaggagagctcagactctcttccttttcttagaaggacttaataccatcataggggctccacccttatgacttaatctaaacccaattacttctcaaaggcccacctccaagtccattgggagttgggtcttcaacatatgaatttgggggtcactgtcagtacataagaaagcatatctgaaataacacacaagtgttcacggaaaggaaaaagatatactaaatgaatgtgaaactgaaaagcaaagtaataccatcaacacttggcaaaatagaacgtaagttgaacatctgctaaatacagaaattctcccacaacatagatcatgaatctgcctcaacacaacacaactacaaactatacatggcaaaagctgacggacatacaaaagaaaaatgcaaatccacagtctcagtgggagaactcaaaaaacttccctcagaaagcaacagatgatgcagacaaaaaataaagacaatttgccaaaatgccatcacaacttgmtatttctggtgatgttggggttatctgcttactgtgtatttgagaacttctgttcacctgcttgtcaaactgaccagcagggggtgctgcrgagggaaacactccatctggagaatgctggcaacttgtctcttaagtctagaggctccttgtccccctcatgatcatcacctatgaggtgcaagcactgctgatacaggagctaaaaagaaattattaagcagttagtgtaggtaagagagtcctcggtaaggtttttcttttaataaaaagcagcccccatataatttcttttctagcaaaaatcagcctaaaaaatcaagccacaagcatacataagcaaactaaaaacttgcatagctaaatgctggcacctatgcaaatagaaaagggatacttggaagccaggcatcctcaacatagaggtttcctcttcctatttttttttgtttgtttgtttgttttttcagatggaatcccgctctgtcactcaggctggagtgcagtggtgcattctcagctcactacaccctccacctcctgggttcaagcaattatctccctcagcctcctgagtagctgagattacaggtgcccaccaccacgcatggctaatttttttttcgtgtttttttttttttagtagaggcggkgtttcagcatcttggccaggctggtcttgaactcctgacctctcgtgatccatcgtccttggcctccgaatgtgctaggattacaggcatcagctaccacgcgtggcctcctattcccttttctttgtattcacgtgtgcaggcgacatggcacaggccaggtagaggccccgtttgcatactaaagattcatgtgggatggccaggctcttcatgcatcacataaatggcacacctgctccaaccaaccctctgagccctatgtaaatcagacactgcctcctcaagctcctctataaaaccaaccacaactcgccccaaacccggaaacctgctcaggcacctttccaatgcatgaggaaactctctcttcattcttttgcctattaaacttttgctcttgaacccactcctttggtgtccacatctcaatttccatactgtgagacagcaaacctctggcatttccccagacaaacgatgccgcttcactgccatctcaagcccaagtgccaaaaatgaccactttagtctgaagaatgccacagctgccaccatgctgcttaggataagcaaggacatgaagatggagtggggacgggtttattagagaggccgcaataaaagcatatcccaggcaactttccacttcttaacttctgtcattttcaaacttaaaggtgttttttattgttgttggtttgcttttctttttaacagtttctatttctggccaaaagactgctttttgttttcctgctatgacatatttattctttgttcaaaagtcttttccatgatttcatataggaactaagaagacagccatgtgtttgctcaacacattgatcccctctccacctagaactctctttactgtttctcccaggaagattccacccctcctgttctgccagtttcctcatatttgcctcatacaattgcccttgtaggcagatgaacccgggctagttctactttactatggacaccaaagcttctgaaataacatctgagtcttgggatttgcatatgaatcttcccttgacacagcaaacagtctttccttttaccttcactaaagtcatctacttgggagaatggagagcactaaaattctacagatttcaaaaacaaacctgctgtgcctttccagagtccttggaatgcaaaagagaaaataggttagaagggatattttctccttcctttcttaccttgaaggagctcctatttttaaagggaatcactggggacaatccaaaagaaactcttgcaaatcaagctttgccatgccatcacragaagggtaacatgtgtgcccagtggtgaaatttttaaattttggtaatgatctccagggtcacccctatggataacaaaaatattttaaaaacctataatggtgccagcctttcagaaccctgtctctttgcaaggacctaccaaggtctagagatcatagcacctcactagcagcctacaggcattctccaaaggttcccacctgccccacccaacatacacacacacatacacacacacacaccctcctgctatcctttggccctagatttcacctaactttattctaaatcttaatcaccctgtgcccccaaactcatgtgttatagggccttggtaatccctttctaagcatattccctgacttcttaaattctatttatgagacatatatctaaartaaaactatatttcaggccagatcagcacgcttcttattacaattataaacactgaacttcttagttgctgggaaaatatattgaaaaggcattattatgcttgtatagccatagattatctagggaaaagtattgagtgtctcgagaatgagtgaaaattgtttccccaatatacacctttttttcttttgaaaagtatatcctgcgtatattcaaaagataatgtttttcaaaaggggaaattgcctccactgtggactcttattaattcacttatccatcaagttctcttattaactcacttatacatcatattcccttattaactttttattcaatcactggtatttgtttctagtgctcataattgaacacaaatttgtttactattatataaaataaagtaacagctattcaccgtttcctcctttacctcaataagttgacatcttccaatagatttatttccctgttttgctccctcctcagatccagatgagtgtgctaagtgatacaaaatgcttttattcctctaccgttcaaccccctgagcccgatgttttagttccacgtgttttagttccaggtgtcacagaatttcccttgcagtgtgtctcatcaatttaaagaatccttctttaaaacttttcttacacattcccagagagcctatcattgtccatttagagttaactctctacataaaatttgtcaatttttttttactcaccactgtttcctctccttattttctgctcctatctgaaatctcttttcctatttgattaaattgcttcttcagtatttcctgcatgtacatatgctaccgatataatatctgaagactctcaaatccacaaatatctttctttgaccctcacaagaatataatttctgcagccttatacattgacaaatgtttgtcttttaccctcaagtgactgattccctatgacatcacattttaggatgaccaaatataattttccactttatacataaggaaactgaggtacaaagaaacaaggtagccttgaactttcattcaaggtcacaaagctagcaaaaagtggatgactagcgatgaggtcttcaggttgagattaacaaacaacatcacaggatataataggatttaacccaacttcaacttcataaaatgaatggacattccctgatcttccctccactcccacccccacctcaggggatttcaggatgcactgggcaaaactgtctccctccatccccaaccgtttctcaggcagtgacaggtgtcaagaactcctcgccgcccttcttgaagcttacattctggagcagggaggcagaagctaaaccaaaaattaaaacaactgtgaacatattccctataaactcagatgtagtatatgaaaacaacacatgatttgacgacagaagatgatggagggagaaagaacaacaaataaataggaaaagaggcctcagataggagcaggtaaaaaggagagaaaacaggaaggggtcaggactggtttccctcaaagcctgtcatttgacagagagctgcagaaagaaggaatagagccaagcacataacaggagggtagagttgcagtctgaagcacccaaaatggtccactaggatggacaaaggacatacttgaaccaccacttagattcatcttcatctaaaaartaagaaattaagtgtgtgtaatatttaattatttagtacattaattacagtagaatatatagagttgatgctcaatttgttaaaaaatagatatctaaaattaaacctcagagattactcttgcctatgacaacgagcttctgaaaggcaaggataggtctcacccatctctgtatcttcagaatccatcatattatgtggaacataataggtatcaatagtatgttggggaaaaaaatcgaaaccatgctgagcaccggaattctgtgtaaatctttttaaaaagtctcttctactttacatcagagtcccttttgtatttttagtatcatccagccccacgccttgcagataagcccctaagaaatgaatgggtgaatgaatgtgtggacagcgggatggatcattgagtgaggagcagtgattcgcaggacctgcatgcattgaaatcctgccaaagcagcctctgcaaaataaaagaccttgggctttggtttctgacacaagttaaaattatccaaggactctccttgggccacttagttgaggtttcctaatctgtgaaacagaaaatgaattcaatagaaagatgattgagacaaatttctggaaggtgccaaagcaggatgcctggcattgasggacgcttcacacctgttatctctctccctattctctcttcacccctactcccgcccggcaactccccgctgtcagctccaggaatacttacctgctgagaaaaggaaaagcacaacactgactttaccccgcgacgcttttaaaaactccaaaacacccagcgcgatggggagtaggtttccctaaagacaggtggagcagccatagttaacttagaggaaggtgaattgacaaagagggttgagccactacgagcgggagttaccttggactaacagttgtatcttcagcgagcacaagtcctggaatctcccacgcccatccctttttttagcgccacaaatgcagcctcctaagagaatgggaagcttgggagtcagagaacagaagattgagctaccattggccttaatggatgtcaatcttcacttgtctcttttttttccttcctcgcctccttgcccctccctatcccggtaggcgcgttctctggcgccatcatatggcagaatgcgggactacaccaaatgcggaaaggcaccttccccttccctgagtatctgcaaactcagggctgggcttggtttttaagagctcagctcctgtgccaggggcggtgctaaaaggggctgcctgcgcagatgtcattcccacaagatgcaagtaaagaagcaccgcggacaccgggggagggtcacagagtgacaggaggactggttgaccagctgactggcctcacttctgacaaatgcaaattacccagccacagtccaaccaagggtatcaaaacaggatctctgcagatggagctcagtgttatgtgttttggatgctcgcaataagattttcatgcaccataaactttcctgagtatctcaaccagttttgttgatgccggggtttgttcaaagctgcagattactgggcctcaccccagacctactctacttaaatatagtggggttcccataatccccattttaaaaaacctatccaagttaaagtacagagaatcacaaactggaagaactccttaatttayaaataagaaatggagacccccccaccaagagagaaaggaatttgcccaaggtctccctgaaagagcctaagaaagcgtgaggctctaaggttaaaatcctacctgacaccctttcctttccccaactagtcctgtgacctctagcaaactatcctgtcctaatctgtgaaatgggagcaacagtcacacctaccccaactggtgactgcaaatattaaatggggccacaatgagtcaactaccaagcaccaccccattgtaagttgaggttgaaatgattctagatcgccctacccccattcatctcccagtaccattgtatgaccgtggaggtgaaaccatccagccgcctgttggtcccaaaccatgttcacctccacccgtggctcagtgactatttcttttcttgaagagagagagaggctccttggagcctctggaatctggagggggatgttaccttccccctgtgtgcattgtcttcccaagataggatggactacggggtctccatgtgaagagttagctgccagggcatcaaggatggctcctaagtggttgctggaggcttagagaccccactccagctctctctcaaatgggggcagcttgtttgcagcagtgagtgaggtgggcccactacgaacccacaggaggagaggaaaagaccgtcccatctaagcttttacataacccattgcaagctccagaatgtggtgcccaggcccatatctataacccacccccagaggccagttctcctcagcctttcctgccacttctgccattgtacatccagacacttcccctgttctcttctatcaaactcctactcatctctcagccatctagtccaaatattaatctttctctgtgatatactctcagggtagaggcagtggtgccttcctctgtattcccagaacatgttgtctgcaactctaaatacagacatcatcctactattagggttcaagagcatcttttatgggttcatgaaggaatcactcttcgtaaacactggccttattccctaacttcaccagacctgaccttagtgcatgatccattcccacctctcccaaccacatgagaggccttttcctctttatgggtttgcaaaccacaatatgacctaaccaccagttactggccaaaagcattcttgtcacgtttattataaaatccagccaacaagatgctttgtgccaagggaatgttccttttcagggcaaacactctgtccccagggatgttagacaacttccatagcmccgtataagcattagctagaaatgagtttttcctagtggcccaacagattccctgagcatccctactctttcacggattcccattgcagtgggattgcatcaaacctctcagggcaaagctgcaaagggaaaagcaaagctagagctctactctggacctatcgctctagacagttartttctctgtgagggtcagttttatacgtaaggaagaaatggaagattgctccccaaaacggcatcaggttacttatcccaattgtgtggttcagttgctacgccagtgatgagcaaataaacaggaagtagaagcacaactattcctaagctcaagaagcagggaagctcaggaattggtgtgcagcagtgctgcttggagcgccattacgaaggaacaagcacggtccactgggaggtaaaattcagggaatcgaagacacagggggtatgggaaacaaggcaggcttttttatttatcatttgccatgatatctctctgtgaactttcttctcccttttaattttccctgtactttaattataattcttaggcctgacgtggtggcttacatctctaatcgcagtactttgagacgctgaggcaggcaaagcaactgaggccaggagttcgacccrgcctggccaacatggtgaaaccccatctctattagaaaaacaaaactcagttgggcatggtggcaagcacctgtcatcccagctgctcaggaggctgaggtatgagaatggtttgaacacaggaggtggaggttgcagtgaatcgacatcatgccactgcactaaagcctgagcaatagagcaagactctgtgtccaaaaaaaaaaaaaaatacaaaacttctcagctaatggccaacattgaaatacaaaacttctcagctaatggccaacattgttaccatcataagtcccagcttccctgtcttcctgtcatcatgtgttgaatgtccacttccctccttatttttcagttggagtggattagcatcaccaattcaacatgtcacaagtagaattacacaaacacacataagcaccgcaatcctggcacacacagcatctctgtcctcagacttccccatccttctagttgctcaagtcaaaagcccaggaatcatcattgagccctctgtttctcttatttatggaccatccataagcaaattccatgggctggcccttcaaaataaatgtggaatccagccatttctaacacttccaccattaccatctgaggtcgggctccaacatctttgcaatcctgggatagactcttagctgccttctcccttccacatctcttcttgtcctcccagagtttgtaccgcgcacaaacgctgctagggtggttttaaaaaatatgtcagggtatatttctcccttacttcaaatcctccatttaaaataaatttcacatttatagccaaatccagacttcttcatatggcccaccaggggctttatgctaatggaatgtgcagatgctcctccctgaggagcaccttttaccagggcaaattttctatctccaatgatgtcaggcaattccgacaacaccattctctactacctcttggttttcatagatatttttcctccagattctacaaaaaaagaagatcaagtctccttgtgcaatgatttactctctgatgtatattggtgccaggcacgtgtactgctttcagatgattcaagaataacagcgatttgagaaagctgtccttaagttttctcttctccttgactgtatgacattatttttacaattatacttccaaagtttgctctttccaaacaccacaagacctatgtaatttaagcagtgattttaggggtctctgtatattttatattaatttcagaaacatgctcatgattattccaccaaaactatcaactgttacataaacatctgtccttctatgagttgcaaaataattgtcaccatccccacttaatcaaccatcttgtatccttctttgaccaacttctgaaaaataacacccaatactaaaggcatctccttctattcagggtctcagacagtaagacgttctttccttaaacagtaagacgttttctcaagtcccatggaaagcacttctttgatatcagtttggggaggccgaactctggagtcttcatccgaagagtaaagtaccgcactcagtaatgcgcgtcctgggaaccaagcctaagcagttttggccgcttcctcgtccaggctggcattgtctgtgttcgccagcccctccgcgaagttagctcatttgcggatcaggccaaatccctggagacttcacgcagacgcgggtgcagcctgctctgggacttgaagtccgctggagcctgagcctctgcatcatccgggtggagctctctctgctgctgccaaaggatcccgcctggatgctcatcccgccaccgtcgcccaccccgcagctgcagaatggcagcaactgccacacacctaagcaacttggctggctattcgccctgcagctcccgccagygcgctgcccaagctggcaatcaaaagtctgggaaagcgcgaaagcgccacgtgcctcgcactccgcccagctgccgcgcagctcctccctggcttccactgggagacaggggactcccatgagaaggaaggagcagggcagtgattgcttagtttatcctgggacgcgggagctgtccccgtggactgagtggcgcggagaggggatcactgagaccgggaagggtcatccagacaaataaggaggggtgcgggtgggcgcgcagtgccctccgcccggccttcagacccacccgcgcgcgcgcaggcgtgtgctctcatccttcccttcccttcactgtctggagtgatgataattggcttccaaagtggatgagagatgagtcatttacatccaatgagggaaaaacagcctccagagactcttcgtccattggccagtgagagtgtcaattcccaggctcctgccgcacgcgggcgagcccttctaggcgggaaaagttcagctgagagatataagagagcagactttccagcacctgtgaatccagagcggtgggcactgacgggcacgtgcaccgtgtggacagactctccagttctatgagtggtttttcttttcccgggtcggacctggagttcttaagaggatggctgacaagggcagtaggcagaaggacctcagcccaaagtcaaggaggttttggatggggagctgggcagccgcccgttgtaattcccttcccgtctcagcttcaaaggccaagagttgtactcctgaaaagatacttggagatcatctgggtgttcctgaatctcaagagggtcgtttgaccctggtgggtcctttccctacccggtgcctttctcgcccgtagaaggagaccaggttcggttaagcagagcagaaactattcactgatcaaggaatggagtaggagagctcctgctcaaagtgcctggggtgtagtgtgggggtgctccttaaggtcttttagggcacgtagttggaaagcaaggattcctggaaagagatggggctttccagaaccagctgagtgtggcagtctcctatttgctgttgccgcccaacactacatgtgcctagcaagctgcatttctcccgtaggcacagattgaggtatggtaattagcaattgaggattcaggttagggtagcgcttctaagttcgtttcccatcttgtagcacggtggttactgacatccagtctctgtttctgtaagcaagcacagcttcaagcacaggttaccttaattggttctggggctttaggaaagcattgaggtcatcctgcggtgacagaggcagctgttcaaagaacttggtgcgagtttgaggcaggggttgtggagtgaggcaggtaaaaatgcagattccatagccacaccccgacatactgaatcagagtctgtgagggtgggatctggaatcctttttaaaaagctcagaggaaccaattcacacgaacaataaaagtttcatctgagccaaagaccttaatctagaaatgagaaaacggggatccccaaaagggttacagggagagggttggaggaaagttagactatgacagttttagggtggttctttcctggccttgggaagttttctcagctgctgctctgatcagtacgcagctgaatgctttaggggaaccctcttcatatatccggagttccctctctgtgcaggtctcccaccagggtctgtggcccgtgacctcttgccaccctggtctctccgctttgtctcctcaaatctagaattccaactggctttgtcttgctgcccttccttgcgacactggcctggaatccttcaagttagtctgctagcgtggattgtaggatgcatctcagttgtcactatccttaattgcatgatgtccagttcctcgcaaagcattgtttcatatattttgcccatttttgttttgttttgctttcagactagggggaaatccagtccctgttcttccattttggccagaaattcaaggtaatgacttttaatatttctgactactagttccatcatctctctcacttctggatctgtctctattcactgatgttcctagtcattatgggtcatatttatccacttcttaaatgcttgctgattgttttattagatatcaagctttgttaatttcacaactttgggtgccagaaatttttaccttcccatcaatattcttgaactttattttagtaccttgatattttacatggaaaccattttataatttcaaagtttgcttttatttgttaggtgggagcagaactagggctaattttgtcccactgtggaagaaatacctttcagagtagtctctctgatatttcatgaattgtgaaattttctagtcagatttttgtgaactgaatctattccctgtcctgtatgagcctcagaaattgttacatctgctccttttgggtacttctttttcctgttccttttcaacagctttattccactcatgcattgaccaagctgaaatctcaagggatacccactgcagatctctgatactatgtgctcctgtggctctcttctccctagtactctgccatacaagctccagtcagcctggcctcccaaaactccaagcttgtcttctcaactcagggaaactgctagactctgcctgttctcttgcctaagatatgccttggaaactccatacagtaacctaaatagccacagggcttacctcatatgattttcttctcagatatcagagatgaggtcccacacagcctgatgtccaatgattgaaagttgttatttcacagatcttttctttttgggttttttttagacatttcatgtggcagaatgaactcaatccttgtttctccatcttatccactagtaaatattagttatattctcttcgaattcatcatgaattccatgaagactgaagaaaacaagtcacttagtgccacaaaagatgacccgaggactagacctgaagtttcaaaggtatatctacttttttacaactcctcagaggagtgatagtctaaccatagtgccatatgaggttcttggagataagttcttaaacaatggtcgttataagcctttctcttaggtagtttaaaatatatttgggtagctcatacacataagtgcttgtggaaagcataatgatagagtatgagttaataatgctaaacgtgtcttaagacaacaagatgactaacaaataatatagacacttaaaatcatggaaagtatagacaggcaaaaataattagctaatgttttctgaggaaacactgtgtgcctggaattgtgtcccatcatatggattatcccatttaacagttaatagaactgtgcagtagttattatcatacttattttacaaaagaagaaactgaagctcaacttgcttatagttgcagaagtaacrgacttcaaagcaaggatctgaacctaggcagtcagactacagagactggtttttgacccacactattttgctcaaaatatgcaaaatgataatactaaattgagatataaacaagtgattttagagtacagagagaagaatacttaattcagactaaggaaactacagcagcatcatatgagaaatgatttattaatgaaaaataaatctaaaattgtcaaactcatagatgtagaagtggttgctgggctgggaagagagaaaaatggaagtgttagtcaagggatacaaagtttccttacacaaggtgaataagttgtagggatctgaacagcatgagtgccaatagttaacactattgtgcactcaaattcttgctaaaatgatagattttatgttgtgttcttattacaaaaataataaataagagggcaggaagagactttgggaggtgatagataggtcgatgtcatagaatgtggtgatcatgtatcttcacattcataaagttgtatacactaattatgtacattaattatgcatttggtatgtctaaaactaatttattttttaaaaagaatgaataacatttcactagtgtatcaaggatgaaggaatggcctgagtaaagtcatgtacacaggaaaacatatttggggaacaggatagctgcatttgatgctatgtaaggagaattcaagaatgtggtaggcaaataatgctttctatactggtaaggtagtgtggtgccaagatcacagtaggctttatatcaataagagcttttcatattgacagtaaaaatattttctacttgtgaaacaataaaatggattcattggttcacctgagtggacattccagaattcagcagagctcttaattcagtagtatacagtttctttgaggacttgtttgtgtgttcagtctctatgttctgcttttcatgttatcccctggctggctttctgcatagtgacaaatacagctgcagtaatatcggatgtgttactctcctgataatgagtctaccctggtttcctgaggaaacttctctttgccatcttattgtcccaacttaagtagctcacccatttcagcacaaaaccttgtgactccgagggcacatatagatattcttaatctgtcatgaattcatttccatacatgtatggctcctaaaaagtgtgagagaggtagaatagctttctggaaaatagctgcagtatctcctacttctttgaaatccatgtgtaggtttttggattttcttctgtaaatagaggagacgcgtttgccgactttatctctgtatcgcttaggaggagttatttaattcactttagactttgttaagttaaatattaatgttaaaatgcccagggctattttgttcaagacagttgccactaatcacgtgatttttttttttttttttgagacggagtctcgctgtgttgcccaggctgtagtgcagccccacgatctcggcttactgaaagctctgccttctgggttcacgccattctcctgcctcagcctcctgagtagctgggactacagggatccgccaccatgcccagctaattttttctattttttaggagagacggggtttcaccgtgttagccaggatggtctcgatctcctgaactcgtgatccacccacttcggcctcccaaagtgctgggattacaggcgtgagccaccgtgcccggcccacatgtgattatttatattcaaatttaaattcaacttaactaatatcaaataatgaaaaaggtgaataatacaaaatctcagttgcactaatcacacgtcaagtacttaagaaccacctgtgacggtagtattaggcagtaccgatgtagaacatttccatcactgcagacattttattgggcaatacttgtttagggcatccaattatagaatagaactacagtgtaaaactgccaaactatttgtctagaaaatagaatgagaggaaaaaatcaaaataaaggaggcaacaaagcaaaggtttataaattgtgaaaaagtggaaaaagtaggtgatacaaaaaaagatgatagaaataaacgcaaaacacgctacacccaattaattgtcttacagattattcgaaagactttaacttttcttgtttcttttaaattcatttatttcatatacagtaaaattcagtctttttggtatatagttcatgtaaccatgcctacagtcatgtaaccatgaccaaaatcaagaagcaaagcagtttcatcacactaaataactccttttgtggttccatcacaataaataattccgcgttctccccactcatcccctattcaccctagtccctcgcaacaactaatctcttccttactctagtgttaccttttccagaacatcatataagttgaacatacactgaatcatacactttgagtctggcttctttcacttagaacattccacttaagattcatgggtgctgttgcatgcattgacagtttttctctttttattgctgagtagcattcccactgtgtgaatgtatcaaaaatctgtttatccattcactcactgaagaatatttgagttgtttcccgtttggggagtttgtaaataaagctgttgtgaacatttgcatacaggtttttgtatgaagattagttttcatttctcttgggttcacctagcagtggaattgctgtcatggaaagtgtatgtttaactttataagaaattgtcaaattgatttcaagatggctgtgtaatttcacatcctcgatacc

SEQ ID NO: 93676 - DNA, 40805 bp, Homo sapiens
aaatcatgcacctcctatcaccacaaacagaaagcatgcacctcctatcaccacaaacggaaagcatgcacctcccatcaccacaaacagaaagcatgcacctcccatcaccacaaacagaaagcatgcacctcctgtcaccacaaacagaaagcatgcacctcctatcaccacaaacagaaaggaatctcagctttcctccactagggggtatttagtcccacagaaaagaaagggatgcccaattcccaccccagctgagaagcaggtgtctcaagtctgaggcagccatcactgcccaggaaagatggggcctggggttaattttctagtgtgcgctcttcggcatggttcagttctctgcctccccaacttcagtatgggcatcaccattgcctcaagtctttatataaacaatgctccaagacagtccactggttactttccccaacccccacctggatgaagatcctgagcctcccacacagaaattctggtccttcaacagaaaatctggaagtttctattgaaacttccattttatctgcaaaccaatgtgtgggcataagagtcttccaccagacttgaaggtgatcagagtctgagaagcatatttgaatcatctcttcatcctcagtgccttcctggcacatagtagggaactcaatgtttattgaacaaatagaaaaagactggaaaaaaaggatcatcagcaatgatcgcttcttgcagctactggcaaatctcacacagtaacagagaagatatcccatcaaaagtcaactcatggctgggcgcagtggctcacgcctgtaatcccagcacttcgggaggctgaggcagatggatcacctgaggtcaggagtttgagaccagcctggctaacatggcaaaaccctgtctctactaaaaatacaaaaattagcagggcatggtggcgggcgtctgtagtcccagctactcaggaggcggaggcaggagaatcacttgaacccaggaggtggaggttgcagtgagccgagatcacgccactgcactctagcctgggcaacagagcgagactctgtctcatacaaacaaacaagcaaaaaaaccaaaaaacaaaacaaaagcagcacagggagtgaaaaggcaaactcagaggcaacacactgtgtaatccatttacgtggcattctggaatcaatgccattatagagtttgaaaacaggttagtgctgccagggcttagagttagtgatgggaggaggaatatccacacacgggtggcatgggagccctgtggtgtccaggcaggtctgcagaccggctgcacaggggcagcccagtattgcctccctccctgcccacagttccgagcttgcttaggggagagcgcaggtgatcaaggatttgagtcaaggcaaggtgggagaacagggcagtggcgagacaggtggttgggtctgggcttcagtgtttaagtaaggggttctgtgcctgagattcaggccccaagggcagggttcaggaagcccctgtgctccatggcattcctcagggagaagcctgaccagaggcaagactttctgaggcccaaagctctgagaaagtgattgtgccccctccccatccccacaaacaatattgaactgtaaaggggtctggtatgccaaggagttggattttattctgtagtaactgatacccacatacaaaagaataaaattggccaggcgtggtagcttatccttgtaatcccagtactttgagagattgaggaggcaggtcacttgagcccaggagttggagaccaacctgggcaacactgtgagaccccatctctacaaaaaatacaaaaattagcctggcatgatggtgtgcacctctggtctcccaaagcgctgggattacaggtgtgagccaccacgcccagccgaaaaaacagaagaatttttaagccttctaatatttggatatagttttccatgttcccatagtttattttatagacctgatggtttagaagcatttcactttccgctttgctagccacgtggttatactttaattttaagtgcatttgtgtgcttttcctgaagcattttcacctaggccatctcacttagtttgaacaagagcagtgcttcgcacgcggctgcttgctgagcagagtccagcgaaccgaattgggcaatatgagactgaatctttccattccagggccttcagatcccagctgtcaacagcctgctgtgtgacgtcactgaaagcctctgtgctctagtttcctcactgataaaggagggatactaatggtacccgctttctggtgctgtgagagttaagagacaatagacagaaatgtcaaacatgtagaactgtgcctggcacacgagtgcttggtaaatgtcagctattcataacagaggaaaaaacctgatgaaaataaatcacttttggataaggattttaatattcttacagacactccccatccagctcttagctcaatggatcaggttatctgcaaggacagcagcctcttgctgggtgccccatggagacagcgatcttccctcctctcttaccttctcaagggtggcccttttccatcaccaaggctgcactcatgcagagaggaagccttcccccccgacctgatcaggctgattaacttcaactcccaggrgagaagactcttgagaacacactttaaccttgggttctcacctggagctccgcatgattttccatttccttaactaatgaatgcatctagcagactcagtccataaaaaaggcacatttgaatgataacagccagagcccggtggccgagctgggctgccgcctgctgagcagctcctttagaaaggcctgcacttgagcgttagttaccctgtggagggacaggaggccggctgcttcacttccctctgctgggagtggccctgcgtgatggggtgcatatccacttcatttattttttaatctgtgggagacaggttatcaatttacttaaagtttgaatgtctgtaaggatgaaatttaaagctagggctctgaagatctctagcagggatgtatctgtcatctacctatccctccatctcagcctgtgaactgcgtgtcatcatgggttaaattaattactaagagrccacggagtccattttatagctcaaatgagcatttttcatttcctgtagtaaacatgacttaagtaaacaaagagtttctctaacaaggatggcttacaagtagaagtggctaaattttcacttttataaattttgctgctttttattaactatcaataaacctagaaagatgatcttacaagtaaacaacagattttgcatactttaaccttaaagatatctctgcctcaactctttgttcacagctctctgacactggaatattaatagttgataatctttccctttaatttttcactgataatattagttcctaacccaggtttttggatctcacaagggttcttattatacagttgtcacatacatttctttaagaagttcaacctaagaagaaatcaagaattgtcttttctggttcatacattaactcctatagggttgtccactactaaagcaacagaaagtgctgccttctttttctggaagctgctgttcttacaagagagcaatttaggagcaggaattgtgctttattaacatcaaagcactggcacaggaagtttgcacactcagctctgggagctttttgatgctttctgcctgctttgggaaattagctctttgtttcattatcagttatctggatggaaactgaagggaaaaatattgatttttttttttttttttaataaattgtaccaggatgctgggtctgcggccctagtggctggtctttcctgtgcttgggatgttggccttgtagagttacttctgtaatctcaagacagaaactgacagctttgtttgatcaaaattgttacttcaccttgcacattttcaagagttctacaggtttaatgagcacagaaatctgggggaactttcactctccagggctccttcatagaggttctcaaatactccatcagcagaggggagccccagatggcaaaaggacacaggatatgtcatctttcaaatgaaccaataatccattatttgattcttctacctttgtcaaaattcctccagcaacgcctgcagaaaatcacaattcttgatacatagcttgttccaataaagcaccacagcatttctagtgactgcaggcccagctgtcaaactctttcaacttgatagagaatatgtacacaaaacctatagctgtcatcatacttaatagtgaaaaacagaatgttttccagctgacactggggacaaggtaacagtgtcagttcctgccgctcttattcaacacagaaattttagtcatcatactaagacacacaaaaaaaggaataaaaagccacgcagactggaaaggtagaaataaaactctccatatttgcagatgacatgattatctacatggaaaatgccaagtaatacacaaataacctcttaaaattaataggtgagtttgccaaggtcacaggatatgagatcaacatgagaaacacaatcacatttctgtatgctaacaacaaacatgtaaaaactgaaataaaaataataacagtttaaatctcttgagagcaaaggaaatatttaagtataaacctaacaaaacgtgataggatctgatgttgaaaaaatcacacaattctgatgaaagaagtgaaaaaaaaaaaactatttaaatagacagacataccatgttcgtgggttggaagattcaacataataaggatacaattctcaatttgatccataggttgattgcaattcctctcgaaataccaacatggctttttgtagaaacagacaagtttattctaaattttatgtgggaaggcacaagccctagaatactttaaacttgacaaagaagaataaagtgtgtggctgtaaaaccaaactgtaaaaaattattaacagttcattgcttgcagtcgaaaaaatgaggaaaagatggacgatctaggaaactttcagggagctaaggtgtcggagagcaaagtatccttgtaaggaatgagacaagataaactccctcccccacacacagtattttcagagaactacattcttggtttcaacctgatgtcataggctgtgttctttgcaacggaagaagcaaagacttcaaagggagaaatcggaagatttcttttttcatcgtagggacttcacatcagcgtttccaaaaccgagtccatcgccttttccctctgcgcagcctctatcccttcctgtgtttcgcatctcaataaacgtccccgccaagtgacttcagcctgaaacatgcggcctcccggactcctctctgtgtcaccgacctcttgcgctcagttctccggagctgccggtttaacctcgcaagtcttcccggaacccgtgccctcctcctgggcagcgttaccaccacgagcgcctacctgagaggacgcctgttctcatccagcctccaccctgcagccgagcaatctccgtaaaacgaacacctggcttagtttctgctggaaaccgttgaatagtccccactgtcttctggaagggtctgggcagctcggcgtggcgtccacggccccaccaggcctctgcctcctgcaggtcccgctacttcgtcaccaaagcgcccgccgcgcccgcatctgctgtgaagctgtgctcgggccgctcccgccgagggaacggccctcccaaggctctgcgccccaattctcgctcgtttgccaagaggtagccgtgtcggggagctagagttctccggggactctctcctgcccctcgtggccctctgtggaaccctcgttttaggatctgcacgccgtttccagtcgcgcgcgcggcacggagaccgcccgctgtgccccgcgctgcgctctctccgcccctctcccgcgcaggcctccctgtgccagccggctgtcgacccaggttaggaagcccgaggtcggggcgttaccccaagggccctcccgcttcccctccgagggcagagaggcgtccgcgcccggacgcactgcgggaacacctggagcsccggcggagctcggctgtccccgcgggagggagcccgacgcgcatccttgggacccggacccggcgcccgcgcctcgggacggatttctgcctcggctgcaggcgcagcgcgcagacctgagcctgccccgcggaaccggggctcgagtcccggcccgagcgcggcgtcggggccagcggagaggggcggaagccgcaagggaccctcggcgcctcggcctggccgcgatgaagtccccgcccctcctcaggtgacggatcgccgctgccgtcccgggctgcccaccaccccggcgcgtgcccgggagcctccaccctccccgggttctgtggccggccacgcgccccaggcacgcgccgcgccgggccgcgccaccaagcccgctgtccccagctttcctcggcagatcccctggctacccccaccctgcggaggggccgttcaccagatgccagaaaatcagggtggggcacgcaggccaggggctccagcggctgggcaccgtgtccttcccgaacctggtgctggaagtgcgcccgcctccgcctctcccaggcacccaccggcactgcccagccctgtctggagggtctaggactgaacgtctgtccccggccttcatcctggctgcagaggactggccgggtgatgccgcgctgtcctggccctgggcccgcctggaagacccgcctgtgtcgcgggccccctccctggctctggcctctaaagcgcccccggcacagcttcccggcccttgcagcccggtggggccggaaccttccccttgtcactgttgtcctttctcctttcagcccgtgtctctcctggaagagaatggcgggcatctttttcctgccatttatctcatcaggttttgctcctcggtttaagcaggaagagaacttcatgcttggaagagcgcatccgtcccagcctaggtttgcttgagagctacatccctggggagggaggggagcgatctctcctttcttggagaaaatagtatcgcgaatatgcacagaacacgtcctactaacatatgcacagaacacgtcctactaacatatgcacagaacacgtcctactaacaaaaacttcttttcgctagggtttcagccgtgcctccgagccctctcccgaatcctctctccctttccactttctttccctcgcccgccccctccaggtttaattggtctcatctgacccctctggagctgaagaatcgatctgtgggacttggaactgaaagcacaggtcggggtaagccccacttcacactggagggccacaagttcctgatcttcgggggctccatccactatttccgggtgcccagggagtactggagggaccgcctgctgaagctgaaggcctgtggcttcaatactgtcaccacgtgagtgccggcccctcacctccaggatctcgttaccctacaagtgcatcctggccgggaacctgagcctccgattttgggggcccagcgtgaggacttaccttccgcacagtcgtttccagcacatacatttaatgcttaagcgtccagctgtcacttagtctcatgctgagtttgctctgtgatcaaagacttggataggggttagtgggagaatctcaagggaggaggttatttcctcaggattctgtctgtctaatgaaggaacaccaggcgcccttgggagcactcagtttaatgacataagcttaaggcacacttacagataaatatgtacttacagatacatgcatgtttttaaaacaaaaaaaaatttttttttttgagacacagtttgttgttctgtttgttgctcaggctggagtgcagtggcccgatcttagctcacggcagcttctacttctctggctcaggtgatcctcctgcctcagcctcctgaacagctggggccacaggtgcatgccaccacaccaggctaattttttgaattgtttgtagagatggagtttcgccatgttgcctgggctggtctcaaactcctggactcaagcagttcaccctttaaaagggaacaccacggtcgtcctcatgcctgtatacaactgaccagccaccctgtatgaccacaaaaaagcaaaactgctccagaatcagaggccctgtcctcctgagggcctgccaccaccattttgtggcaagcttaccatcacactcactgtaaaggagaagatgcttagagggccctgtgccttattgcagagctggtattgaagggtgaatttgaagctgagaggcagtaaactggttcatttaaaatgcaaagaatttaatcagaaataatcgttgagttttattgagagctgctactgcatgtattggggggacaatatagtttttcttcactgttcttttgaattgctgaattacaacggcaatttttctgatagtcaagcagccatgtggtactggtataaactctgcttggctctgagatakgcacacattacatacacacagattgctagactttatttgctagtgttttatttcaaatgtgtttatgattataagcaaaacggatttaaaattttattttgttagtattcttgtccagttttgaatcaatcttataataagctcataaagtgagtaaatcttcttttcttacttattggaaatattttgcacaagaattatctttaccctggaagtttcttaagattcacctgtaaactctgtgactactatcttttgtggtttgtgaggtgaagggtttggggacgacatagctctttgaatggttattaactcatgtcctctatttcttcttgaatacatcctgctctccccctttttttctttcctttcttttttctttctgttttctttttcttttttttttttttttttttgagatagagtcttgctctgttgcccaggctggagtgcagtggcgcgatctctgctcactgcaacctccccctcctgggttcaagtgattctcctgcctcaccctcctgagtagctgggattatggctcccgccaccacacccggctaatttttgtatttttagtagagatggggtttcaccatatcggtcaggctggtctcaaactcctgacctcaggtgatccgcctgcctcggcctcccaaagtgctgggattacagatgtgagccacctcgcccagccttctttcttcttttgaacccactgggacttaagaaatttttcctttctttcctgtactcacttggaagttatatacatcacrttgtgtattttggctgtttttttcttttttcttaatcttatctatttagtcttttcagataactagcttgtagctttgttagtactctctgtatatttcggatctgtatttcacagtttctgagttatgtgtaatttccttttctctactttattaaatatagtaccttctcttctctgtccttctcagtttcctcctcctccttcttctttttccctgagttaaaatttagcttcttttacttccagtcttttgtgttttctaatatattccttcaaagatatgaatgtttctctgagtgttgctttggttatatagcccacaaattttgctatatagtgctttgaatgtcatttattttcaaatatttcctaagttttgatgttgtttctattagctatttgggaatacgctttctgttttatttatttatttatttatttaaattttactatttaactgtgatttttaaatttgtttgcatttatcttgggatcatggactatgtgatataggtttttggaatttgttgagatttacttcgtgacatagtacatgccaatattttacaactgtttcatgcattttaaattttggtcttttaaattttacattcttttttcatacttagttgtacagatgcgctttttaagggaatgtagatgctccatctgttggctactgggttctctatgtatttattacatgccgacttttaattacacagttcaaatctgtatccttacaagtttcttctttttctttttttgctgcttattttctttgtttcttagaggggtactttaaatcttttcactgtgatggtaactgatgtatccaggtcctctctaattcagtcagcttctcctttacttacggcaagctatgttgtaacttacaacatacaacaagctacgttgttaagctcatagaaggccatgattagtatgtcttcttggtgggccatacagtcagttctacgatgtattgtcaaaaatctctgcactgcacaaaattgtgtaataaaaaccacagggcttataggaaacatgatgttaaggggcataacactcaaacatgttgccagtggcacaaaaaaacacagttgcctagtgaactatgcctggtatacctaataaaatttttactcatagccctatgggggagggtcccctgggggcccttcttgctaaggtctaaaggtagtacccttactagatttactgtaactccactatcttcacagaaactcctsatttattcttattttgactaactcatagcaaaaatttataaggaagatgtagacatttttgtttttgttctcttttttaatttatacttttaatgagtgttacaatagggcagtgagtggaagaatttatatataaatcccaagaaacccagcatcataggataattggcagcttgaaccacaattggataatagagcaaggaactattaaagatggtcatggttagtgtaayagaggtttaatttccactggtaacttcaacttatttcaaaatagagctatgcatggttttggcttggatttggggcagacctaacaatttggaggaagaaataagaagatactcatcatacttccctctcacctcttctagctatgttccgtggaacctgcatgagccagaaagaggcaaatttgacttctctgggaacctggacctggagtatgtggtgttgctgcttctgtgmmctggycaggggcagggcacagaggtggctactggggtggattagcaaccaaagagaaccagggagggacctgggtctggagtcctgttctaggactgtgagaggccctgcacccaggacccagacgctccccaaycgtgacctgtcacccagagggactgggcctgcagcctccgggccccacctctccactgcagcccagaggggcagaagaccctgggagccgcccgactctgcatggggtccggcgcctgggctggggcagggcggcccctctaggctagcaaggctatggggtcaggttcactgttgagaccactgagccctgggtgtcacccttcctcctcaggcccccgatggggctgtgcagaggctctgaggctgggagcagctcaggccaccgacctggtgtgggagtccccgcgctttgggggtggggccgagccrtcccttcgccccaccaggcagctcctccaccctgtgatgcgygtggcccccacccggcctcatcctgggccgtcgtgggaggggctgacgatgtggacctccctagggccttcgtcctgatggccgcagagatcgggctgtgggtgattctgcgtccaggccsctacatctgcagtgagatggacctcgggggcttgcccaggtaagcggggctacartcccagagtcgtggttctagtgaagtatttgctttaaaaaaagtgaatttcaagctagtaacaaggaaagtaacctttattcacggagccgatgggaggtgtgctgccccacgccacgcaccgtgcctgtgttgtcttgtgggaagcctgcggtactgcggtggcggggggcggggtgcagttgtcatccccgattcacagatgagaagctccagacgttggtcctggggccttgggcatgcggtcaagagggtgtgcrcggggagaggtggccacaagaggctcccactcttctttccccatgcaggaggggctgtrgcctcctctgtccttctcaaaatgccctgggaagaaagggaccagaagctttaaggcctgcaagggaaggttctgacgactcggcttgttttgaaaacttctgatctttcgcttattttgtgaggggaaggcttgcctttccatgcagtgagaccaccctcagctcccctcccttccctcttgcttttctttgccttgttctctcctctgtgattctggcccccagcccagactgctgagggtcagggtgagactccaagactcctctctgccacccctgtggtgggcagggcttcctggggaatctggggctctgcctccagtgagcacctctgcacctcagagtcagatgaggcctttgcttttctccaggatgaagagagaggtctttgcttttctccaggggcagagaaagcctgagctgaggggagtggagttttcgggaagcagtgactcccggcatagcttggctggaggcctgcctggcacttccccagtgacctggagtgggtggagtatcattggcacgtaggctcctgccctgagcctgaagccttagcccttagtggaaatgtgacactgtgcctaaggaaattttttctgtccccaagaattttttttttttaagacggagtcttgctctcgtcacccaggctggagtccagtggcgcgatctcggcttgctgcaacctctgcctcccgggttcaagcgattctcctgcctcagcctcctgagtagctgggattacaggcgcccgccaccacacccggctaatttctgtacttttagtggagacgggagtttcgccacgttggccaggctggtctcgaactcctgacctcaggtgatctgcccacctcggcctcccaaagtgctgggattataggcatgaatcaccgcgcctgaccaaaaaatgttttcaataaactgaaaaagaatagagagtgttcaccaaaaggtagaagaaaaagctctttaagacatggctgtaagagccttgacaggccagcccctcagtcagaccaaatagagctgaaggcctttccgaagttgtgaagtgccttggagktggaggcggccgtttcctttcaaatcccacaagtctgtgagaatggtctgaaagtctcacgcggcacagatctttccaggacccgagtgctccgggaccrggggtgtgaggcagctgggcagatgtgcggcgagccggggcagctctgagcccactcctgcttccctctcccaacccgtctcagaccctgagcccgcccctcttgcccccagctggctcctgcaagacccccggttactgttgaggacaaccaacaagagcttcattgaagcagttgagaagtattttgaccacctgattcccagagtgattcctctccaggtaaagccaaattgtcccctgcatctttcttacgtgccctttagggaaagagtttgttctggcttgatcactgaagaggccacatgcagtctccatgaacaattgagttgactttcttgtaaccttgagttctggacccttggcttgaggacagaagcactgacctgtcctgtccttgttgtccgggtaagcttccccagggttgctagaaagactcatcacacaaggcagggactggttgtccacatgaacttactattcctcaagcttgccaatcttcccattgcttctttccacttttgacatggcaaaaagactcagaaggtacaaatgaatttttggtcagataaaaatctcaccttccaccctgtcccaaagccatttagttgccctttcaggagacaaccaattttactagattttgtgtctctttttagagattttatcagcacagaagcaaattatacacacgtgtctatgcctctcaggcatttttcttttgttacttgaaatacgtagatttgaaaccagccactctttttagtgcctgcacactgttccctagtagggatgtatcataattcatttaacaggtattcagtccaggcttggtgactcatgcctataatcccagcattttgggaggccgaggcaggggggtcacctgrggtcaggagttcgagatcagcctgaccaacatgggaaactccatctctactaaaaatacaaaaaaattagctgggcatggtggcacatgcctgtaaccccagctactcagctggctgagacaagagaatcacttgaacctgggaggcagagattacagtgagacaagatsatgccgccacactccagcctgggcaacagagtgacactctgtctcaaaaaacaaaacgaaacaaaaaaacaaaactcgggaattcatatcctattcatggacatttggattttccatttatgttgtaaaaaaataacttgcaccccccattccgtgtctgtgtaagtctacctgctattgccctgcattctagtttgatttactcctacagatgggaagaacacaggtgccatgcattgcctttttttttttttttttttttgagacagagtcttactctgttgcccaggctggagtgcagtggcttgatcttggctcactgcaacctccacctcctgggttcacgccattctcctgcctcagcctcccaagtagctgggactacaggtgcccaccaccatgcccggctaactttttgtatttttagtagagatggggtttcactgtgttagccaggatggtcttgatctcctgacctcgtgatcccaccacctctgcctcccaaagtgctgggattaaaggtgtgagccactgcgcccaacagcattgccttttttatggtgtacccagacctcatgcacttgataagaaacgccttcatttttaccatggcaacctagagcacacagtcaggtctgtgacaaaaaaagaacattgtactgtgcggtctacaagacagcattgtttgatcattgtaatttttttaaatttaaacaacataactcttccaaaagagaagatgcacttggatattaagtaaaaatagttcaaggacacgtctcttgatgcagctcgagatgggataaaaatctagattatggcctggcatggtggctcacggctgtaatcccagcactttgggaggccaaagtgggaggactgcttgagcccaggagtacaagaccagcctgagcaacatagtgagaccacaactctacaaaaaatacaaaaattcgagagygtggtgagcacctgtagtcccaactactcgggaagctaaggtgggaggatggcttgagcccagttgcagtgacctgagatcgtgcctctgaactccagcctgggtgacagagcaagaccttgtctcaaaaacaaaccaaaaaaacacctggatttttaggtagtagtaggctgatatcttactcttctgtttgggagtaaatatggcaaacatatagatctaggcctttgtaactaatttggaatcatgaattgtgagttctgtttttttttttttttttggagacggagtctcactctgttgcccaggctggagtacagttgtgtgacctcggctcacygcaacttccacctcctgggttcaagcaattctcctgcctcagcttcctgaatagctgggattacaggcaccaaccaccatgcctggctaatttttgtatttttagtagagatggggtttcaccatgttgcccaggctgatctcaaactcttgacctcagatgatccatctgcctcggcctcccaaagggctgggattacaggcatgagccacagaacccagcctgtgagttgttcttattaggataattataaagagaagaatcgagggataacaaaggaagaatgtgagagagagcttaggaatggtgttgctgcaatacagttttgagagacgggcactgctgagaggaagaaaaccctgtctttaggattaaactctggctccgttaggtggagttgaggtacatcttttgtttgaagggctgaagctgtatgtgtctgtttgcatttctgcaatctagatgggactcagtggcaggagtgagcctcaaaaccagaaagactggtggccgggygcggtggctcacgcctgtaatcccagcactttgggaggcygaggcgggtggatcacgaggtcaggagatggagaccatcttggctaacacggtgaaaccccgtctctactaaaaaatagaaaaaattagccgggcgtggtggcgggcgcctgtagtcccagctrctcgggaggctgaggcaggagaatgacgtgaacccggggggcggagcttgcagggagccaagatggcgccaccgcactccagcctgggcgacagagcgagactccgtctcaaaaaataaataaatacataaataagaaatagacatgcattaaaataatagataggtaggctatataatacacagaaaacatttatacaaaattaatgtccaggctgggagctgtggctcacacctgtaattccagcactttgggaggccgaggtgggtggatcacgaggtcaggagatcragaccatcctggctaacacggtgaaaccccgtctctactaaaaaatagaaaaaatgagccgggcgtggtggcgggcgcctgtagtcccagctactcgggaggctgacgcaggagaatgacgtgaacccgggaggcggagcttgcagggagccaagatggcgccaccgcactccagcctgggcgccagagygagactccgtctcgaaaaaaaacaaaaacccagaaagactgaatatttggatggaagttttaccagaagcacaaatgccgttcacaggcacatgtatgcaacgaggaaagctaatttacaggcatcccattgaactgtgggaaatgctaggaaacttttaagaagcaaggaattataagggtaagtgaaatgtaatgccccatacctcgcataccttgcactaatttaattattgatacatcattagtattttaaggtccctttacggaattggttgtcattattgttttaattattatgtaaaaawaatttttagagtgcattactggtttacttgggacttttattcttatcctgtttatttcacaaggccgactggaaattcctctgcaatggggtttttagaagtctcacccttcgggttggagagaactgatactgttcaataataaaaacaattgttttcaactcactcgctgagaatatttatgtccatccagcgagtaattgctgagcgccagggcctgtgtggtcactgctgggtgtaccaggcacagcggagaggccatgcgtccactcggggggcaggcgtggcgctgccctgtggaggcaaacagaatctcagtaggagctgtgggaagccagcacgcctgggcagagggtgaggcgggaaggaggcagaggggaacctgcaaaggaaaagctgayagtcatgcctcttctccttccttagtgccctcagagccagcattcttttgtccaagagggaggaacgcactataaagctggccatttatgctgtaggcagtggggaccccgggcctgctgtatgttgggacaaaaagctcagaccttggctttccagcactcaggctgccttctctgtggctgggctccaaggagaaggaaatgcatcagactgtggaaggaccctgaaagaggatactctgaaaaggcctttgagtttagcataactaggtcaatgttgatggtctggatggcaggatgggctggaagctttcccaagggagtttgaggagtgagttaaaagcaagaaagcaggagatgtgggtgtagatgaccggtagctcttctaggaagtgtggctcttaatgaggagagtgggaagagggkaacattcctgggcctctgcccccatcttgatgcggagggtcctgagtaagtttccatgatcatggaggtcagcttgttgcaaaggaaggtcaaaggcacggaggggagaggggctgtgcccagagccacgttcctgatcaggcagcggaaggccgtgggacccacacgcaagtggtggcataagcctaaggcaggagggaggtgggaatatggatgggattggcgtggaagcaggtgcatttgtaggtttgagggctcaaatttaagtagccagtgtgagaascagagggaaacctggcagttacgtactgtaacgcactagggaaggcggctcccacagcagccaagtgacccagcagactctaactccagcgctggagcagagcgtgcagaccacaggggccgtggatcagagcctgccgcaccagctgtgcagccttcggcagcaagctcagagactccaggcttttgccccaaatagcctcactctttaaccctcctatgcytgtttctcagtaccgccaggcaggccctgtcatcgcggtgcaagtggagaatgagtatggctcrttcaataaggataaaacatacatgccgtatctccacaaggtaagagggccttggtttggccccatgtttacatgcctccttcctcctctgtgcgtttctgattcctggatgcatgagtgatcgggctggacactgtgcattctgagaatgttggcctgtgaacacgaggtgcggaggggtgccggcccactgcatagctgaaaatttgcgtataacttttgactccctcaaaatttagtcactaatagtctactgttgactggaagccttaccaataataaacagtcgattaatgcaggttttgtrtatctattatatactgtattcttacagcaaagtaagcttcagaaaagaaaatgttactaagaaaatcataaggaacagaaaatgtattgacttctcattaagcagaaatggatcatggtaaaggtctttatcctcatcatcttcaggttaaacaggctgagrgggaggaggaagaggtggaggaggaggagttggttttgctgactcaggggtggcagaagaggtggaggaggtggcaggagaggcaggggattgtaactcgtattgaaaaaaatccgagtataagtggatccgcacggttcaaacctgtgttgttcaaggttcaactgtagatcaagttcattttctctgtgaatttacagcagtcaagacaatcactatgtacctaaataactattagaagacagaacatggcrttaaagggctattcctttctgcttcctgtctctrtgacccacgactctcattaaagctggggctggtgaatmttcctccactgtaaataatgcttcaagaacttagtgatgggactctcagcttgaagctttctggcctgtaagataaacgtcgtctcttctgtccctcttgcttcttcacggagggactgtcaggccagggaataactgcagtcctgcctgctgtccttcctggtggctcagcccctgctggcccctgacttcccatattcagaaagctgatgagagttcagtctcaactgaaccccaccatgggctgccaagcagagtgcagggctgcagggttggcctgagccgtcctgactccgcccttgcctctgcagcagtgcctgtgcggagacctctggctggaggccggggcgggaaggagaggggtccccagctgggcaaagtggggaggagggcggggctggacttcatccacgtgctggctcccgcgctatagctgtggcttctggaggtggacaaggtcagagagtaatttccctccctgtcttttcccaggggacgcgtggctgccctgcatyggttgtgttcagccagcattatttaatcggttgtattcagccagcattatttaatcggttgtattcagccagcattatttaatcggttgtgttcagccagcattatttgtttttgattttaaaatttaccggctgtgctcagtggcgcatgcctagaatcccagcactttgtgaggctgaggtgggtggatcacctgaggtcaggagttcgagaccagcctggccaacgtgtcaaaactctgtctctactacaaatacaaaaattagctgggcgtggyggtgcacacctgtaatcccagctactcaggaggctgaggcaggaaaatcacctgaacctgggagatggaggttgcagtgagccgagattatgccactggaytccagcctgggtgacagagtgagactcgtccccccccsyyaaaaaaaaagaaaagaaaaaaaaagaaaaagaaaaaaaaaccattcaactccactcccaggcccaggtctgactcgataagcacaggagacgcacagccaggccctggctatctggcctcgtgaccatggtttttcagattagatgtccccatccctgcagccatggcaggcttccttgttccccttgacagtgttcggcagcacctgagcttggtgaattccctgatggttctcaggaccccacagctgcagcctctccccttccagcacagagtggttccctggtcttcttcctcttctttcagtgacttagatcctcttccagggcatttcctggtaaactcagccctttttttccctggagrctttgatcatggggtgtcagaacccacactcgaccgattttagggtcattccccacaaaagtcaccaggctgagaccgagacagtgctttcccccaatttactaagttgcagaaggtcagactctgaattcaaacccgtgtctagctcccatctcacccaactgaaccatgctctgtttagtttccgatttcctcatatagtcggccctcagcatccatggaggattgattccagggcccctgtggacacaaaatcggtcrgtgttcaagttcttgacataaaattgtgtggcacttccatgcaacctatgcacatcctcccatatgctttttttttttttttctgagatagttttactctgtcacctaggctggcgtgatctcggttcattgcaacctctacctctggtttcaagcaattcttgtgactcagcctcccgagtagctggaattacaggtatgcgccaccacacctggctaattagagacagggtttcaccatgttggccaagctggtctcaaactcttgacctcaaatgatstgcctgccttgacctcccaaagtgctggcatgagccaccatgcctggcctctcccatgtactttaacttayctctagattacttctaatacccaataygatgtaaatgctacataaatagttgctatatagtactctttaggaaataatgatgagaaaaatgcctgtgcacgttcagtacagatgcaattaagaaatatatttttggccaggcgtggtggctcatacctgtaatctgagtgctttgggagtacaaggcgggaggctcactkcaggccaggagtttgagaccaggctgggcaacatagtgagcccccgtttctactaaagaaaaaaaaattagctggacatggtggcgtgtgcctgtagtcctagctactcaggaggctgaggtggtaagatggcttgaatccaggagtttaaggttatagtgagctatgatcgtgccactgcactccagcccggggaaacacagcaagaccctgtctctaaaaaaaatttaaaattaaaaaagtaaaaacatatttctgactgtgattgcagaatgcatggatgcagaacccatgaatatggggagctgtatgtatttcttttttcccatgggaatgagggaattgggttcattttggttaattttctcaacaggccctgctgagaagagggattgtggagcttctcttgacctctgatggtgagaaacatgtgctgagtggccacaccaaaggaggtacacatttagagttagttcacaggagaacagggctctcagccagcccgtgtaaatcttgaacacactgcagagaaaaccaagtgcatctcgatacctccctttcccgtgtccactgggatggatcctggagttcgatgttacaataaatgaggactcaaggttaaggctcagggccactcacagctccctatcttggccttgctcctgccgtctttaaacacagcagcactggagctcctctgttctcaggacgcctttccatctcccatagtttttctgtggcaagaaatctgcattggtgytgcgcctggcttgggatcagggccrtctccactaacttgggaaaccacagggagaaccagaagatgggtgttgtgtcaggaaccccgcctagatccggttccattcctgggatcctaccgcccaaggctctgtgtggacacttaggagatcctagagaattaagtggcaggaagattctggacggactcatcagatggcaatagtgagggacrcgccygggagtgagcaggsgagcggggcgagctgctgccggcggctgccgttctgcctccttagtagtggctcttccaaggaagcctggcacactggaacacgtgctgagcttggggccaggaagcctgtgtcscgtttccagtctaatcatgtcagggagccttggcctggctcacttctctgcacagagtgtggttaatttcaacagtgggtgtcctcgcaagtgtcagggatgtggcratggccgtggcagccctttggatgtggcagagtggggtccagacagcatctcgccatcctcactgctgagcatgggttcctcctgcgtgcgtccgggccgggggcgcattccttcccttccctgacagcacttgtctcatgcctcagctgggtctctctcttctttatgcagtgttggccgccatcaatttgcaaaaacttcaccaggatactttcaatcagcttcataaagtccaggtaagacatttcagacaggcagggttttacagctcctcctaccatgacctcccttgcctatgtagctggtattccgtgaaaacaggtttgacaagaagaccgcaggttttcaccctgggtcctcggcaggttccaagccattttgggagccttttgggatggggaaggaggagggaaccctgcttgtgtcacctccgcttgtggatcacgtcatggagatgagtgggaagggcgaggggtggtgggaatcagagggagacaatgttccctttcccctgtgaagagagtgctcagagayggctatgcgcgttgctcacggaggcctcccagggagttctggtggggctagcctttcccgccacagcttacatattatcagaagggatgagggttgtacctgcactgatttaagacgtggattgagcggctcccaccttctctcagtgggtgacctcctgtgacattacagagaaggacaagccacagcccagcctccagggagtacatctgtcctttctctgcagcctccagggagtacatcatctgtcctttctccacagcctagctagagtgcgtgcttcaagaccaggcctggtcacagtctcctctgcttaacaccctctcctggttgtcctttgtgcccaggatgacatgcagcccccacgccttggccrgctgggccgctgtgagcctctgcctccgctcccagccccgctacccctcccttgagggccttccttccattccagcacactgcagccccgaaggctagccagactctgcagcttcagggctctgcccctaccctccacccacattataaataagactcatgaaacttacttctttttttcatcaatttctttttttttttgagacagagtctcactcttgttgcccaggctggagtgcaatggtatgatctcggttcactgcaacctccgcctccttggttcaagcgattctcctgcctcagcctcccgggtagctgtgattacaggcacctgccaccacacccagctaatttttgtactttttggtagagatggggtttcaccacgttggccaggttggtctcaaactcctgaccccaggtgatccacccaccttggcctcccaaagtgctgggattacaggtgtgagccactgcgcctggattttcatcaatttctatacagtttccaactcggtgaaaggcaggggccctgccagggctctgtggatctgtggctatctctagtttttcaatacctttgctaagtcttcttcctttttgttctttttttcttgtcactttcatttaacaacttaattgaaatctcatttgtacaccattaaattcacccattgtcatcatacaattcaacatacagagttccacaaccatcaccagaatccaaaatgttcattgcttttaatgcttatcacagttaatcccgtctccagccyygggcagccaccagtcttctttccagttctataaatttaccttttctagacgtttcacataagcgmgctcatgcagtatttagtcttttgcatctggcttctttcacacagcgtggtgtttcttcgaggtccatttatgcatgttgtagcaggactcagygcttcatttccttcaatagctgactggattgtgcttgactgtcacgtacgtaaagtcatagtcaaacccaaaggccgtcctgctttagtgtgttaatacagtgactgtggtttttgcatgttgaaccagtcttgcattcctggaatgaatctcatctgattgtgagattatcattttctattttgccagattcagtttattcatatttttgttgagaatttttgcttccatgtttatgaagggcattggtctttggttttcttttcttaaacggtatttggttttaaaattaggataacgctggcctcataaaatgaatttggaaggatgctctccttttctattttctggaacagatagtgtagaattgttagcatttcttaatgtttggtaactttcatcactgaaactatctggacctgaagttttcctttttagaagaattttaacttgcagttcaatttctctaacaacacaggaaaatttaagttatttcttcttgggtgagttgtagtaatttacatctttcaaggatttattctactcattttattctattccatctaaatttttgaattcgtggacatagagttgtttgtgataatcccttgttatcctcttaatgtgtttgttgtcatagcgatggctcctctttcagtcctaatattgctaattttgtgtatttattttggttagtgtggctagaagtttataattttttttgatctttgcagagaatcagctttcggcttgattttgattccctgttatttttgtgtcttcaacttccttggtttccgctttgaacttttagcattttctcccttctgctgccttcagattgcatttgttctttctcttggtctttctggtggaaatttagcttactgagttggaactttttttcttttctaatataagtatttatgctgtaaatttctctgtatgtactagttttgctgcatctcgccaattttgatgggctgtgttttcattgagttcaaaacttcaaaacatttttttaaatttcccttgagactttctttattccatgcctcagttgggagtgtgctgtttcatttttgaatcttaggggattttccagctagtattctgtgattgatttctagtttaatactgttaaggcccaagaacatacttgtataatttctgttcttttacatttgttaaggtttgtttcatggatcataatatggtcattcttggtgaatgttccatgtatgtttgaaaataatgtgtagtcatgaaaaaatgctcaccatcactggccatcagagaaatgcaaatcaaaaccacaatgagataccatctcacaccagttagaatggcagtcattaaaaagtcaggaaacaacaggtgctggagaggatgtggagaaataggaacacttttacactgttggtgggactgtaaactagttcaaccattgtggaagtcagtgtggcgattcctcagggatctagaactagaaataccatttgacccagccatcccattactgggtatatacccaaaggactataaatcatgctgctataaagacacatgcacacgtatgtttattgcagcattattcacaatagcaaagacttggaaccaacccaaatgtccaacaatgatagactggattaagaaaatgtggcacatatacaccatggaatactatgcagccataaaaaatgatgagttcatgtcctttgtagggacatggatgaaattggaaatcatcattctcagtaaactatctcaagaacaaaaaaccaaacaccgcatattctcactcataggtgggaactgaacaatgagaacacatggacataggaaggggaacatcacactctggggactgttgtggggtggggggaggggggagggatagcactgggagatatacctaatgtaaatgacaagttaatgggtgcagcgcaccagcatggcacatgtatacatatgtaactaacctgcacattgtgcacatgtaccctaaaacttaaagtataataataataataataataataataataataataaaaacaaacaaacaaaaaaagaaaataatgtgtagtttacatctatttataaattcccatcaggtcaagctaattgatgatattggccaagtaatcactatccttactgattttctgcctactcattccatcaatttttgtgagaggaatgttgacacctctaaatataatcatagattgtttatttttcttttacgcctattagtttttgcctgttttgaggtgcattcacatttaggattatgatattttgttggaagcttggccgctgtatcattacgtaatatccctctcccttgttctgaactctattttgatataaatatagcaactgtagctttcttttaattaatacctgcatggcatatctttatccttttgctttttatataccttaacatctgtatttaaaatggatttcttgtagatatcatatatttacatattgctttaaaaaattcaatttgwcagtttttgtattttaagataatgtggctacatcattcacatttaaagtagttattgatatggtttgactgaaatttacctttttgcaaattcttttcttttttgtactttgtttctttcttgttctttttttctcccttttctggagctaattaataattttttgattccattttatctgttctgtagacttattacttatgtcagtttaaaaaactgtagctgttgacttagaatttaaaatataggccgggcgcggtggctcaygcctgtaatcccagcactttgggaggccgaggtgggcggatcatttgaggtcaggagtttgagaccagcctgaccaacatggtgacaccccatctctattaaaatacaaaaattagctgggcatggtggtgggtgcctgtaatcccagttacttgggaggctgaggcaggagaatcgcttgaacccaggaggtggaggtagcagtgagccaaggtcgtgccattgcactccagcctgggtgacagagggagactctgtctcaaaaaaaaaaaaaaaaaaaaraaagaaagaaagagagaaaaaaatatatatatataatttaaaaattaacctgacacgactaatcatactgaagtgtaggtagtactaggattgtacmatagtgtcttcttaattccccactctaaagatgtctcttcattattgtttctacttccatggtttctgatgagaagtcagtattaattcttatcttttttttttgtcttttatcctctggctacctttagaattttctgtttgtctttagttttcagaagtttgagtgtaatatgcctagatgtggtttgtttcttaaaatttatcctgcttggtgttccaggagattcttggatctgtggtttggtgaaatttaccaaacattaagtaagaaataataataattctacacgatatgttccagaaaatggaaaaggagagaatacttctaaactcattttatgaggtcagcattgtcctaattccaaaaccaaataaaaacaactaaagcaaagaaaaccaaagaccaatttcccttatgaacatggaagcaaaaattctcaacaaaggatgagcaaattgaatccagcaatatgtaaaatgataatacattactgatatggtttggctgtgtctccacccaaatctcaacttgaattgtgtctcctagaattcccatgtgttgtgggacagacccggtgggaagtaattgaatcataagggccagtctttcccgtgctattctcatgatagtgaataagtctcacgagatmtgatgggtttatcaggggtttccacttttacttctttttcattttctcttgctgctggcatgtgataagtgcctttccccttctgccatgattctgaggcctccccagctatgtggaactgtaagtccaattaaacctctttttcttcccagtctcaggtatgtctttatctgcagcgtgaaaatggactaatacaattacatcctagtgagattcatcccaggaatgcaagattaggtcattaattttgtagaattctgagctgtcacttattagatattttctcygctctctcaccttctgcaattcaaatcgcacgtacattagaccacttagtgtggtctcacaactcttggatgctgttttctttcccactgtctttttttctctttacttttcagtttgcttaatttctactgacttatctttaagttcgttgattcattcctcatgcctgttgagtttagcgatgagcctattgaagaaatttttcgtttctcttgctatgtttttgatttctagtatttccatttgcttctttcttagttttcatctttcagccaaaattatctatctgatcttgcatgctgtcttccttttccatgatagtcttaagtatattaatcatagttattttgaattccttgtgagatagttacaacatctgtgtcttayctgtttctgatgattgctttatctcttccaagtgtgttcttttcttgcctttttgtatgtctcataattttttattgaaaactgcgcatcatgcataggacatagatactgtcttggagatcagcctgcctttcattctgctaggccatgtgggattttgtgttcccctcgtctggagttaggctggttgtggggtttgttgttgctgtgttatcctttgtgcatcatgggcttcaaatgtttctggtggtaccttgtgtcaagggcaagtgctggtttggcagaggttgttttctctgtgtctgcattcccctctgagtctcgcctttgcattgagtcccacagagaatctgttgcttgcggatctctcagctatagtatgtgttactttttctccagcttggttagcctgctggtgagggagaaaggcttcccctgatgttctgattatgccttattgccagcagatgctgtctgtgggtctgaggggtgtggcctttgcaggtgctcctacccagctcttcttctagcggcagatctgatcctagcatgtgttcctcctttcccaaggatagtgcatcccctgcccctttcccagatgcaatggattttatccagttaagatgtccttaagtgacagcttctgtgctgtttctcagctgattggggcttttgttccctagagaagatgggctgggagaaggtctggcagtggcggtggctctctcccctcagccagcaccagaaaggaagctgtgttactttgttagggttgccatagcaaaggaccatagactgtgtggcttaaacagcagatgtttattttcccacattctggagactacatgtctgaaatcaaggtgctggcagggtaggtttcttctgaggcctctctccctggcttattggacggctgtcttctcctccctgtgccctcacatgatctcttctctgtgtgtgtctgtgtcctaatctcctcttcttataaggacaccagacatattggattagggcccatcctattgaccacatttttttttttttttttgagacatagtcttgctctgtcgcccaggctrgagtgcagtggtgtgaactcggctcactgcaagctccacctcctgggttcacaccattctcctgcctcagcctcccgagtagctgggactacaggcgccckccaccacgccaggctaattttttttgtatttttagtagagacggggtttcaccgtgttagccaggatggtctctatctcctgacctcatgatccgccygcctcagcctcccaaagtgctgggattacaggcgtgagccaccgcgcccggcccctattgaccacattttaatcaaggcgcctacaggctgttctcctctgaggcctctccttatcttgcagatggtcaccttyttaacgtgccctcgcatggtctttctgccgtgaacacgagaccctggtgtgtcaaaatttcctcttcttatgaggaccccggtgacatgggattaagacccacactaacagcctcacttttacctaattacctctttaaaggctctgtctccaagtacagtcacattctgcagtactgagggttaggccttcgtgtgaatttggctgggggacgcaattcagcctgcaacagagacttgcccgggattctcccgaatctcccctcagaacagctggtagacttggggagttaaagccagcatcagggtgtcagccgccatccgtctcggctcccttgacttcagactctcacgctggcccacactgtcttcagcacttctttaatatgatctatttgtgttatattagaggatctagccccaggtaagcaagtggcttgggtccagcttcttcctgcaggcatcaggttttccatggattttaggtatttggttgctctgtgacctaggttctctgatggacccaagaagccatgaatttacagtttttcaagttttgtcctcgctgtgaggatgggatttatgtttttcccactgctatatctctgagctgtactcagaagtctgtttccttctgagtaaatgtagttgttacagtttttctaggaatatgtccatttcactcaaactaaaatataatggcatataattatgcacactatcttcttgtttttaatggccgtatcatttgtgctggtctttccttttcatttctgatcttaattattgattcgtttttactctgtcttaacattctcatcagaagcatgttggttcttttcaaagaaccgatttttttttaagttgtctctattgcaaattaatttcartttcactgcttctacccttaggtttatatttcctttatttattttactatttttggtttattttgctgttctaatttcttgaggtgggtaattagccttcacattttatctgtatgttttattatgaacatttaaggaatggatttctcattagttcatgagttttatatttggtatatttgatatactgtaattcagactagtgtgagtattcaatatgattgtttctttggcctatgagtatgtttagaagttaatttttaaattttcagacatacggagtttttctatttttttcctttatttcgctggtcagaaaacatactctgtaccttttcaaacttttgtaaattgttttctttgattattaattcatgactttttaatatgtttaatgccttcttatcaattttaatcattacgttgttgaagcttaaagtggcttctcgctggcctgctggcagcaccttccacctggctcctctctcctctgacgtgaccccatcagtctttcatagtttacttggtttccakccaaatacaatgtcccagactcacctgatacatttccaatcctcagcccagaaacagcgatttctcctaagaaccctgttgcttctgtagaatacaagctgtgcttactatcaaattgctgttacttctaagcattttcagagtgtagggccaggatattggcatgttttaaacgaggagaaaactgtggtttcattgatttcttaaaaaatacaaatttagaattatagaggttatatttaacttttctgatttatatttttattttttctctgactttggacatcrtagttgataacaacattcacaattttgttattcacttaattctataatatattcataataggtttgaaataacactgataatattactgaaaataagaaaaatctaatgatcttaaagatttctgtggtttttcttttatctttaaggtatatcacacagagaatgtgtagtgaaaattctatgtactaaggttacatggaatactttctttgttttatgtaattgttttaccaacttggtgtagagttagattcatttgttttcaatttttaggtgtgattctttattttttatgtttaattttgtttgtgtttatgtcctatcaatggtcagttttggtaaatgccctrtgtgtttgtaatgaatgtattttgcggtactgggtgcagtattctgtttaagttctatgtcaattttatttattgtgttattctagttttctatttccaattgatttttttggctggttgtattggtcactgaaagagatgtgttaatatttctatcataattgcagatttgcatatttctaycagtagaccttagtattttacctgtcctttagcaagtttatcaaagtttgcttgatgtattttgaggctatgtaaatgtggacttgttttatcttcatggacatgaaattttatcactagggagtcatcctgtttgtatgcagtattgctttttgtcttaaggtcacttttgtctgtcattgatattgccatgccagacctctctgattaatatttgaatgtgtatcattttctatatcctcatttgggttttaatcttgctgtaattctacatttttctttagacatctctcttattagagatcagaaattagttgaatatttttattttagtctgacacaattaaacttttatttggagctgtcagtcattcatatttcatgtaattcttgttagactgaagttgaaccwkccatctgattatgtgcctgcttttaagtgtttcttttctttttctttacaatcttggcttctttttatggattcgactatttaaaaaaatcaatttctgttttttcctatgtcattctggagttacagagtctgattttatcttttaaaagtcatccttgaaattttaatgtaagtactgagtcccctgcagtctaaagttctgctctccgcctggattgtacaagtgcctcagggcaagcactgactctggccactccatcagatgcatcttctggatttttcttgtatttgatttctatctttttaaaactctaaaaatatcatgtatttgttttatacaatcaatattccttcagttttagcccaatatttatctttttgctttttattatttttcatatcttggagattctactcaggatcagttttcttctgcttgaagtacatgctttagtgatgtctgtttatggcagactcyctgtttccaggcttcagtctcttcccggctctgaattctaatgtggcagttttctttcagcacacagtctgctgacttcactgctgtgatggggagggcttctgtcaggctttcttttctcctttattactaagaattttttgtttctttttttgttttctgcagttgaactatgtctctttctgagtgtctttttatttattattccagtttgtcgggcttctagaatgtgtgtgttcccaggtagtagttcttcaaatgttgcttctcctgtgttgtctcactcctctcatcctggaattccagctaaattcattaaaccttctcaaatgtgctgggtatctctttagtttgtacatttttgtctacttatgctgctatttggatactttcttctgatttattttcatatacacgaattctcttttcagctgtatctatggtgatactgtatttgatttaactttgtaaaaatcctcaatgagwgggttcgtccaaataacatagatcatgattgttggaaattgtgagtctttgatcatatctttaaatatgttaaaaaatttttttatttggtttattctcttkagggacacaagttatgtgtaatgcaaacttcttctgtcttactttcacatctcctgcatccatttccttctcattctttctactctctgttcattttaactgtgctcacttttcactccttttcttttcatgtccctcacaatgtttattttccttttagctgcttccagtttggacttaatattttctattttatctgccttaaaaaaaatctttgttaggtaatattttagctccttatatttccttatcatgtcttccttgagtacttttagttctctttttatgctctccatttatagaggtgattgtttcattggggtttttaactttataacaatatttttgggtcacaattttgacctatgctatagaaagtttttggtgttcctcctctaatttctttccctgttgaaaaagaaaaaaactcttttttattagaattttaaatgtagattctattgttgtttcttttttattattactcatctttgatggagatgagttcttattggctcaaggactcaagagaagttgctgtgagagcccgcatgcgactgcgctaacaatgtatcttagtggcataataacaatgtatcttagtggcacaatgctgtaggcagggatgaattcttatctttacccatcttcctttttgctttctctcctcccagggagccagtatagatgcaggactgctctcagatgcctcacaagcagcaacttcttcctccttatagttcttatctgtgattcttccataattttgtccttctaagcttctgatgcactgaattatgtaaagtgcattcccttcaccagcttgtgcaccctattctgtaactgataataaatggttggtattgcactatagagtatgcttcttacttaggagaaatttgtgctgttagtctttcctaaaatcttcgacaaagagcattctctctctacgttttttgaacccctgatagaccttcaatgcttttgcgcttcttcctcctcatttatattttgaagtttcagatgactcttagcttcacagaggatgttgtttgtgtttccatttctcagtccttattttgatttggaagatttccaggaggagaatgtcaagcccacagtacaattttaacaccagaagtcagtctttcctcttgaatacaaatggaaaattaaggatctgtatttatttaataaaatttcacaaagagaaaataattaaattacaaataaagaagaaaatggaaatcagggaacatggagttaattcaggcaacaaaatagagtagtaaaaaggcttattaatatgcatagagatatgaataagattatacctgaacaagagtgggctgttaagtaagagggacaatcagggaaccaaaaacaactctttgaaattaaaaatctaatatttgaaattaaaaattaaatatagaagttggaaggtaaagatgatcaaattccctaatattactattagtataagcccacaaaacagaaaagagacaagataaacgtcttataggagtattgtaggagacccaacatcttattaatactggttgcaaaaagagtggacaaagagcatggaggaaaggaaattgcaaataacataagaatttcctttaactgaagtatctatatgtccagatgaaaagtgtacctcaaatagtaagcacagtaagtgatgaaaaagacctaaattgtgaaattagcatcctacagagagaaaaaccacaggtttacatgccaagcaaaaacaattagaatggcataggattataaaatattggataataggaagcaatggcatatgcctttaaaatttgaggctaaatgaattttaacttagaattttatacccaattaataattttaaatattaattgtgttgatagccagacatttaaggactcagaatatttattttccactcatcttttctatggaagtgtttgaaggatgcaggaaatgagaaatgaaaccaaagtagaagagaacataggatctggaaaacatcataatccaaatccagggagcagctaacaaaagtcctaggttgacagatctttgggcttagagtgagacaatcttagagcagcagcatgccagaggactccaggagtgcagctgaaaatgcatgctgagtggctgacatatcacccagaagaagctcagctatgatcttccgttttaatatccatggcacagcaacagccaggcctactgtagaggaggtgtcaccttttaaaaacagaatctacgttattcagcagcactgaaaatgctaggctacaagtggaatgcaggtgtcaggctgaaagcctgtggcatctgagtttctacataaggaattgcggtcaggtcctcgtgtatccaaaacccattctttcaacaccagccttgggtgagacagggttgaaattgctgatggtgctttccgggtatagtagggaggcacatgaagctggagaccatggacgtttaggagtggaggaaccagagctgtgaatgacggccaagggccgtgggggaagaaatactggatcaaaacgggaaagctctgaattgggaaaaaggagaaacgcatgagttccttagttcccatctattgcattcaggttttctgatttttcttttttgttttttgccagacttagtatttgctttggtttgtttttagagagataagccccttctgattatggaatactgggtcggctggttcgacagatggggagataagcaccatgttaaagatgcaaagggtgagtgttttgcagtgtttgactccaggaagagatggccccaggtcccatgagaactcattcatacagttctctgctaattgattcacttgatcagccgtagatattcatgcaacttttcacatacaagcactcagccaggccctgaggatgctctggtggatagaaattatatggttcccacccccaacagagtataagttagtgaggtccacagatcattacagagtaaaacaatcaatatgtagttccatgtttggtggatactttgaagcaaacaaacagggtgcagtgatagaaaagacagaagaaagacctgcgcaggtaaggttaggtggtcaccgaagcttctctgaaaatgtgacatctctgaggaaggtggaacattaatcatctctagcagtgcataggccctctctatggcattgtcaactaagcactaataatagtcaggggacaacatgcagcgatagccaagagcatggatcttggagccaaagagatcaggttttaatctcagctctgcagcgctagccatgcgctagcttcatgcaggcttccttcattttaattctcagtgacctcatccaaacgtgaggattatcataaaaccaacctcatgaggctggtgtgaggatcaagtgctgccacttagagcaatgcctggcagtcgtttacttaataggcatttgtgtctacagaagatatttcgaaagagctgttatgaaaacaaggccacttgtatctgaagtatagaaaaacattgaaaaatacttgggaactgagaaaagcctgttttaggttgaaaaatagaaaaaaagtcaaaagaaaaatgccactattaccaccaataacaccacataataccatcactaccaccaacaataatgccagcaacaagacctgcagcatcatcacatcaccaccacaatcaccatcatcaccaacaccaccaccagcaccaccaccatcaccatcatcaccatcaccactaccaccaccaccaccaccaccaccatcaccaccatcaccaccatcaccatcaccaccaccaccatcatcaccatcaccaccaccaccaccatcaccaccaccaccaccaccaccatgtccaccaccactaccaccaccatcaccatcaccatcaccaccaccaccaccaccatcaccatcaccatcatcaccatcacctccaccaccaccaccactatcaccaccatcaccatcaacaccatcaccaccatcatcaccaccaccaccaccaccaacaccaccaccaccactaccaaataaaacttttctggtctcttgtatggcaggcactgtgccttttttccacatatattacctcatcaatgaattttctcatcagtcccatgatatagctggaattaatacattcatttaacagatcaggaagcagtggcgttgagaaagaaaataggttgccccaggtcatacaaatagtaacgagcacagccagaattgactcccactctaaatgacttttaaccttcttcttcccactgtggccagtggagagatgattgcagctgtttaaacacagtacaaaatggaagttttgtggctaaagattaagagcaaccacttgtggactatggcggtgtttccaagtcagtgttcccagaaacatttyactggaaggtagtaatgagggtgtactaattatatgtatgatttcaaaaaacttaaggaaaattagatatttaagtgacatgagggttcttaggttattatttaatagatgtagtttagagtcaaattatgtcaatattttggaaaaaaagtgttcaaaaatctcttgggattgacaagattcggtgtcctagagtagttctggccaattctgcctatttttttgttggaatctttgtagaggttgaatgataaaacatttgcagtaggtctttaacgtcatcaataggttcttggaaactaaacaaaatgatgtacagcatatcctcatataatactgttttcttcaacattgtttcattataaaattgagagaaaaattgtttttttttttatatcattttacttaaagtctccattcccaagaatgtatatagctgtgaagcgaggagttactgtaactgattgtggagtggggttggaaaggataagagtttgccaraggcttctgtctcctcttaatttctaacattctctgtgttctcatgttcccctttgcagaggttgaacatgctgtgtctgaattcatcaaatatgagatctccttcaatgtatatatgttccatggtggaaccaactttggtttcatgaacggggccacatatttcgggaagcactcgggcattgtcaccagctatggcaagtgtcgctggtgtagtagcctctccagcatgggcggtgctggggctttacagaggaggctccggaagcctgttctggcaccactgggttcttgacctataatctatgctgagtactgaagattttcctatctactttccttccttctgtatgttcataatgccccaacaggctgtcattgcagtagacagggctttccgggacttagagctccgcttcacacatctggtatactgccctgttggcttgaacctctgaagagaggcagggtaggaacggtgactgctgtaaaggcacagacctgcacggccgggcgatacagactgagcaaagaaaagagtacccgttgaaggggtgtccactcttttggcttccctgggccacactggaagaagaagaattgtcttgggccacacatgaaatacactaacactaatgatagctgatgagcttaaaaaaaaaacacaaaatgttttaagaaagtttatgaatttgtgttgggctgcattcaaagccatcctgggccgcctgtagcccatgagctgtgggttgaacaagtttgcattagaaagtgaagaagtgggggcaagcccagtgtcatggcttgacactggaagccagtggaaggtgcccaggaagagttgtggggaatgtccttagactggcatcacacacccacgtgggatggaaggtgtcttccttttgtctcactcacggtggccctggccatctcctgccagcggtgctgaaacagggcctcctgcagagactgcatggctggtgactggccctggtgtcttgcagactatgatgcagtgctcacggaggctggagattacacagaaaaatatctgaagcttcaaaaactctttcaatctgtctcaggtactcagcacccatttaacttacgggccagccctcctcatgtggagtctctgttctgtggaaaagtgaggaaggcgtgggtctcccttgtgggcagcagttacaccaagctcctgagaacaagggcaaccttaacttcgaaccctgggcttaaaatctgtgtgattttttaaaatcagggtttctaagcattttataagcctcagtttcttcactgaagcataaagrtagtaaccttggtctcctgtgatgactgcgaagattgagttactctttgtaaagctcttataccatggatgacatagtaacccccaatatgaaaggaaaagccatgctggataggcatggggggcttagagaaggcagtggtcatctcaggcactttttgccctgtgccccatctccattgcagcaactcccctgccccgagtacccaaacttcctcccaaggctgtgtatccccccgtgagaccgtcgctgtacctcccgctgtgggacgccctatcctacttaaatgaggtgcgtgctgcctggccacaggaggcggagtggccactggagggatgggggagggattccttcaggaaactttttattaggaagtgggaaaacaaatcctctgcatttcattcaaatttagaactgtgggacaagagccaccagctccttccgggtggactgtgaaggggtttgaccttggagtcagtgtgcaggggaggggcagcag

SEQ ID NO: 93677 - DNA, 13959 bp, Homo sapiens
ctggatggaatgggaggctattattctaagtgaagtaactcaggaatggaaaaccaagcatcgtatgttctcactcatatgtgggaactaagctatgaggacgcaaaggcttaagaatgatacagtggactttgaggactcggaggaaagggtcagcgttggcgagggataaaagactatacattgggcacagtgtacactgctcgggcgatgggtgcatcaaaatctcagaaatcaccactaaagaacttatccatgtaaccaaacaccaccggttccccaaaaacctattgaaataaaaaacttaaaaattaaaaaagtgttatgtaaatgtgaaagattacgtgcacgccaccttatagaatcatgtggaatctaatggagtggggatggaaaggtagtgaggtaacttccttggaggattatgtggtcagttttgtagatattatttttgtacattttgttgattgtagactaagctcatttgaggctagaggaaggtactaattggtctttacataaaaaacaagtaaaccctatttccccagccactctttaaattccctcaagactgaaattatattctgtacttctgtgtttccttcacatatgcttgggataatattaagtgccatatctataataataagtattactagtcatttgtggaaccctttacgatatacaaagcatttatttggactgatctatccattcacctcaaggatcctctcatgtatatttaattgacacatgaatagaataaaatgaagttcttccattttcatcacattaattagacttttatcagaacatcagggctaactgctttgtagttagaacttttgaggaaaatgttcagaggaggattattgatgctttgtaacatgggattgtcttagaagcaaagggctacatttgaagacttaacccagtgaggctggaaaacagagatgctgtagggtgagttggaagaaaatggcagagttattttcttcactctgcttccaacttacttcagttttcttttccaaatcacactctggccatagaatttaacttttaacacaatgtacaacagttgtttttctatgacaaattaaaagatgagtcgaagagggtaggtaactccataactcagtcctttatatgacccaagagaatcactgttacagaatgtgatgctaaaggctgttactagaccctgaattttgtagatgaggtaattgaggtttccctaggagtttagtcatttaccagagatcacaatttaaagctcttccttccattgagaatttttcttataacttagaactaaggccctaccaattttcccactttcattggatcaactttccttctaagtttgagatcatgagtggcctcattttaggaaggccaggatggagccacagctactgcaattctctcagtgatgagagccaggatccggggtcatagaggggtagacaataatggttttgtaggtgagatggctaaggtctactagcaaattctgagctattactggtgcgctcttggtttagtaaatagagcaactgaactaggattttagcaactgggttttatccctgacccttaaattaagtaatgataacaattgcaatggctgttgtttttttgggcactttctgtgtgccactatgccttgcaatgtgttaaacactttatatccattacttcatttaatcttctatacagacttgtacttgtattagtctgtttgcattgctataaaggaatacctgaggctgggtaatttataaggaaaggaggcttatttggctgatggttcttgcaggctgtacaagcatggcatcggcatctgttcagcatctggtgaggccgggaagcttttagtcatggcggaagggaaggggagccagtgtgtcacatggtgagagagggagcaagagagatgccaggctcttttaaacaaccagttctcacatgaactgacagagcgagaactcactcattaccatggggagggcaccaagccagtcatgagagatccacctccgtgacccaaacacttcccactaggtcccacctccagtgttggagatcatgtttcaacatgagatttggaggggacaatcagtcaaactatatcactattattattcctggttgattggtgagaaacaccaggcagggaaaataaataacatgcccaaagtcattgtttctaagtagcatagcctagatctgttagaccccaagcccatgctttacttgtgtctacctgatgcaaagtctacctcacttctgacatctgttctcttaggtaatgatgacagtaatgataccttacaccaaagagaagttatgtaagaaacaatattctaaatgcactgtatgcattacctcattttactaggtagaaactcttttcatcttcagttgacagatgagaaaactgagggatggaatggttatgtaacttgttcaaagtcacccagataggaggtagagaagtcaggttttgaacccaggttgtctggttctagaatcatacccttaatcattatgctggttctagaagctggacaatttaatatcttacattatctttggttccatcaatagtttttggagcctactgggtacatactgaagtgtgaattctgcagagatagggatgtaataaacctttttctacactgctttccttccagttagatagctgtattgtttttttaaaggaaagataacaatgccttgtgaaaaattttggtgtgttgtgattgaagaatatgaaaaaaagaggaatttcccatattcccttctcccctttgaaatggaaaagaagtttctgaaaggggtaagaattatagcttagactgaggcatactgttgatactggctttgaagtattccatccactggcggatcgtggaatctcccattaggtatatgagttttcctctcaggcattccttcattttgactgtagccaaactacaggagacaggattccatgtgtttctccagacatgcccactggggattgtggatgtcattccaaacttgcatttctctttcattgcaactgtttcttctgccaaagaatcaatgagataggatcttccaaaacatcaaattacccgtcagtatgtattaagagccctctatcctctaagtatcctaagagggggtaaggtggtggtaatggtggaaaaagtattactgaagtattctcttaatggaacagctgtttttttaataaaaatttttctctgatgtgaatttcctaaataatgttcattaatgttcgttataagagtatatgtttcttcccagaaaaaaaatggctttctggaggaaaatttaagtattttccagcttttctatgaaactaaagtcatcaattcttgcataggaatggaagctcaattatcctatcattttagctcactttacccctaagtttgtcacactgtgtcttaaatgacaccatcaaaatataaatcctttgagttaaataaaggtgatataaaaaatattaacaactagtttggcttgggaactgaccaatccaaatgaatatagctataggctggagagtgtcttagaggtccaagatgggccaaagatgaacccctcagtcactggtttagaagagtctgggaatccacaggttgaggtagccacaatggtgaggagcccgtggcaggtttgattattaatcaactgagagaagtagtttaatattttaataagtgggatgagtgtactcatgtatgtgtggtaaaaataacatttctacatctaggtacatatttacacttcagtgtaaataggtttattagtgattagcaaggctttctttctttttttatgattagcaaggttttaatgctgaacttgcagagacataaaagctcttgccttgagtcgttttagataagaatttcctaggctatttggattcaaagaaattggagagaaattagtaaatataagtgtgcaagttctattttttatgctaacaattgtttgaaaggtggcaaagatcaagagggaggggttataataaactgacactcagatggcaggttggaaacctctagatggtgatgggctagtggtgatatgggaagaggtgatgggagtggtatgaagagaggtgttgtggtgaggtaaagaactgggtatagaattgggaaagagttaacgtttaaaggttgttgtataaaatgggcagggaattcactgactgacaaatagactgatgatgagagttacagttactaaaataggcttatgatattccagtgattgaattattcactcacctaggtaactggtgtcttggccaaccttagataagccagatgaacagagtgctgataggactgaaacagtgaacaaatccagtagaaagaagaaaccctttaaatgggtctagaactaggcaccacccaccaaacacaggagtacttactgttgcatttggagacactaattgtattgaatttttccataatctctacacccacatttgaccttaaagacacaaatacagaaattaatctgtaggtggcctcaaatcaggaaacatacagaaactagattatccagtgcctcagttatttcttagagataagtcaattattatgcctacagtttcaggccatttagtaaatttccatttctttgcctattaggctatgggatacagttacccagaaggtatgcaagagaatttgttgagttgcagaaataatgtattagagcacacacacatacacacatgtgcatttctcattttcttctagtttttattctgtatatatttttttcccattgataagaattaaatgttcaaaaagtttgtggattactagagaatgggcactgtctctaaatgaattcacagatcctttccccaaaggctcttactaaagacacccaaaattaatacactcacaagacttttctttggatcagtatataggccaaatcacaatatttgcacaggtagtctcaagaagtaattatttttacctttcaaagaggctcttttcttgtttgctaagataagaaactttcttgttcttagaatacatgtgagtgagtgcagcacagggcatgtgttgaggcctcacacagtagaagccttcttggtctctgttgtccaggtactggcacaattcagcatttgtgtttaggatcaggccacattcagagtggacttgggaagtgccattgacaaactggccagtgaagatcaccctgtcatagccttggttccttgcactccagagagctgacaccccttcactggggtggatgagcagcagagacagagagacctggccctcccagaacagagtgaagctgaccaggtaggtgccgttgttgaagtcagtcacctttcctgaagcacctgccatcagcgctggggaagacatcctggccctcaggaaatccccgccatattgcttcctgcgtcccaagtggtccctcacctccagcaggatgtgcagctggtctcccctgcagtacgtatctcgagggttgaggatggtggctgtgctatgtgtggcgctggtggtggtgttcacgtgggtgaaaggtctgggtgggatctgctgatctagtttctctatgatttcctttattctgagttcagtctctgttagtggctttaatgatatcagtggtgttttagggaataaggactttgtggagttgttccagtaatggagggagatggataagtttagagcagaccaaacctgaaatgacagcaaatgtgacatgagatggataaatttagagcatatctgaactgaaatgacaggaagtgtaacatgctatgaaattaacatgttcctagtcatttttacttattgtgattttgaatattgatttacatactattatcaatattatttaaattctccaataaaaaggcatagaatggagattgactgacaggagagacagagggacaggaagtgagcaagatggcgcaaaggcagggcaccaggaggaaagtctgttactactacgataggggtgttggaaattactattatggacaagcccacccaaggaatcctcactgaatctgcgtgactcataatttgctgctcaactatggtttctactgaaaaatggaaacccatcaccctcacaragccaatgctgaggagatgaccaagtaccacagtgatgactacattaaattcttgtgctccatctatccagattacgtgtctgagcacagcaagcggatgcagagattcaacgttagtgaggactgtccagcatttgatggcctgtttgacttctgtcagttgtctactggtggctctgtggcaagtgctgtgaaacttaatgagcagcagatggacactgctgtgaattgggctggaggcctgcaccatgcaaagaagttcaaggcatctggcttctgttatgttaatgatacaatctgggccaccttggaactgctaaagtatcaccagagggtgttgtatgttgacgttgatattcaccatgatgatggcatggaagaggccttctatattacaggctaggccaggactgtgtcctttcataaatatggagagtacttcccaggagatggggacttatgggttattggggctggcaaaggcagatattatgctattaactatctgctcctagatgggattgatgatgagtcctatgaggccattttcaaactggtcatgtccaaagtaataragatgttcctgtctagtgtggtgatcttacagcatggctcagatgccttgtctaggggtcacttagattgctttaatctgatcatcaaagggcatgccaagtgtgtggaatctgtcaagagtgtcaacctgcctatgttattgatggcagaaggtggttacaccatttataatgttgctcagtgccctggaaataagaaagagctgtggctctggatatggagatccctaatgagccttcatacaatgattactttgaatactttggaccatatttcaagccctacatcagtccttccaatatgactaaccagaacactaatgagtacctggagaagattaaacagtggctgtttgagaacctagtaatgcaggcccatccacctgcagtccaaatgcaggtgattctgaggatgctgtccctcaagagggtggcgatgagaatgaagaagaccctgacaagctcatctccatccgtttctctgacagatgaattacctgtgaggaagagttcttcgactctgatgaggagggagagcgtggctgcaagatctctcccatcttcaaaaaagccaagaggattaaaacaggatgaaaaagagagactcagagatgaagaaatgtcacagaagaggagaaaaatgaaggaggagaagccaggagccaaagaggtcaaggagcaggtcaagctggcctgagggaacctcccctgctctggcttcctgcctagtccccaatctttctctcccaaaccctcagattttatgtcttctatttctccaggtattcatataaaatttattaaatataaatagttccagggactagacagaaattaagaccctgagcccagggcagctgtgctgggtgatctcttctaggaaatgccttgccacctatccctctgcaggtcttaactctgaagcataaaaggcgccaggtctgggtgaagggaatacttttgtgcaaacagaagacaaaatcctgaaatgccaagtgcctgcttagtagctttggaaaggtgcctttattgcaccttctaaaaggggtgtctgggtcttcaaggttgccctgttcttttcagctcctaagtaacatcagccatttttagattggttccattctcataccttctcactggcctcaagtgagccaaaaaactcacactgcctgccatctgtcttccccmagttctgcaggtggaggatggtagtctagtctcctgccatcctccacctgcagaattgggggagttttgagatactatttttatttttgtgagactctgtaataaaatggtatatttcattactccctaccccaaagacagaatggttgagtagattttaaaaaaacaagacctaactctatccttctgcaagagattcacttcagctttaaggacacacatagactgaaagtgaagtaatggaaaaagatattccatgcaaatggaaaccaaaagagagcaggagtcactatgcttatatcagataaattggatttaagtcaaaaactgtaaaaagagaaaaagaaggtcattatgtaataataaagagatcaattcatcaagagaaaatgacaaatatatgtacgtgtgtgtgtgtgtgtatatatatgtatatacattcaacatttagaacacctaaatatataaaggaaatgaaacaggaactagaaagaaattatttaggtagacagtgagggtaaaggagtccttggcaaggcttccctttttaacaaaaaggagcccccaaatcatttcttttctaacaaagagcagcctgaaaaatcaagctgcaaacatagataagccagctgaaaacttgcatgggtgaatgctggcggctgtgtcaatagaaaagggctacctgagggccaggcatgttcaacatggaggctccatcttcccttttctttgtcaccatgtgtacagtaaaaaagcaggcaacatggagctggccaggtagagaacccatctgcataatgaaagattagagtgggacagccagcttcttcatatgctatgcaaatggcacaccgagtcctaaccagttctttgtgtgctatgcaaatgttacacctggggtgaccaatcttttttgccctgtgtaaatcagacactacctcctcaagctcatctataaaatctcctgcacttcactgtggaccaaaagacccacttaaatcccctgtctctacagaagagagcttttctctttcttttgcctgttaaacctctgctcttaaactcactccttgtatgtccatgtccttgatttccttggagagagacaatgaacctcgggtattatcccagatgaaaaatgccatttcattatgggagcccacctgggatccgaggaagattcatagaagggggagtatagaagtggaccccaactccttctttttatttcaaggccttctgctctccatttaaaaatcaaaccaaatactgggcccccaatcagccatttaaaaagttagcgtggctaccagccttacaagactcaggggacaggcttgccagggagaacttagctaatccccccatgtcctcagggtgctgggartgttggctttgtttctaattggtttccttttacagagagcctcgctgtcatgtggggctggaagaggttgagaggcactgaaggttccttgccagggagacaccctggtgttacctgaaggtttctggactaattccagcctccaacagcctgatgggtgatggcaacaggatctgcaagctttttctattgcaaattttctcctttcctatccgcaacttccatgtctcctatccactctctgtatgcaatgctttaaaaatttttacagttcggtgaagtaatcctcttaggcaagataaggaaatgccataatgcctgggaatatagctcatgggattgccgtttttgtgattttctaggcacagaggtcctccttccctccccacaccccctgtgaacatctctctctttacccttggtctggagagcacatggtatttcaaggtcaacagcatcacctagtggaacgggaaccctattccatgaggcatattgttggccctttgcggaaacactcttaacttcctaattctcgctttttttgcccctctacaagagaccaggctttatgctccttctttgaacaagaaaactctgtcttcaacaatgaggggaaaaaggtcctccaaaaccaaattttagtctgaacatggtcccatcagcaggaaaacaaccatttggttcctacgttcttttaaggcacctattctgcctccaattaaaatggtacttaaatagtaagaggaatttaattccggaagttaaccagagccactgcctaagaataaatactttagtacaggacataatagcaaattgtacagctcaaacctgcattctctattaaagggcattacccaaatgtaactgtaacgaagtctctctcaagatccatctattggagagtcatgcagatcacacaagtctagaaagtcaaagggaaatcaccagcaaaggactagagtcacatgggtgagcatgactaatcccaatccattggttcctctggtttcattgctatgggttatgcttgcatcaatggatggcaccttaaaagatgccagggctcagggcgccaaggagggaaaacagttggggggatgcccccactgtcttcccctccaccctaggcctttccaaaggaaacgaaggtgactaaagggacaccttttttcttgcttctctttctagatgaataacagaccatctttggtctgcactcctctggagtgctttctgaagcactgggattcctttgaccctgagactgaagaaaaagtggctcattttcttttgcataagggtgtggccttcttaccatcttgaaccatcctggcctgcagaggggagccttaattttaatactatccaacaattagatattttctgtagatgggacagcaaatggtcagaggtctcttaggtacaggctttctttgccctgtgagacaacccagaactttgcaagcattgcacaatcagctcagctctttcagcagtcatatcaggagggcccaaagggaatgattccccaaaactagagaagcaacctccagggaactatctgaggcagctattgagtgtccaggcccttcttgtcctccctctctggggccccctccagctgtgccatcaggtcctttagctccaccatctccaaaactccccactcccctagcttcactcttatccttacaggaaatgctcaatggaggtgatgtcactagggttcccttcttattgcaggatcttagacaaataaagggagacttaggccaattttctgatgaccctgataagtatataaaagctttccaaaatttaactcaggtgtctaacctctcatggagggatgttatgctgctcctaagccaaaccctaactgcagctgaaaaacaggcagctctgcaggcaggggagaaattcaaagatgagcaatatgtctcctatagtaggccaaaagggaaaaaagaatatagagaaaatgaagaaataggggagccatcattcccaatacgaagagaggcactacctcttgacaaccttgtttggaaccccagtgacatcacagatgaatagaaaaggaaacactttttaatgtgcatattggggggcctatgaagaactaaggccaaacctcttaactactctaaactgtccatggtagaccaaaatccaggtaagaatcccacagcctttatggaaaggctgaaagaagcactaataaaacacaccttcttgtcccctgattcagtagagggacagctcatcctaaatgacaagtttattacacaggcagctcccaatattagaaggaaactacagaagtaggctatagggccagatagcattttggagaacctcctgagggtggccaccttagtcttttatagtagggaccaggaggagacccaggaaaaagagaggaaacacaagagaaggactgaggctctggtagctgctttgcaggcttgcaaagtctgggatccctgaggtgcatctgcgagttgctattgatgtgggaagtcagaggactttaaaaaggatatccaggaagcaagaagaagccacctcgaccctctctagcctgtggtggggaccactggtgatcagactgcccccagagatgaaggtcaacaggttcagaaccagtctcaaagatggtccagcaggactgatgggtcctggtgctcaagccctggctccagtggctcaaattcccattacagcacaggaggcccaggtaattctggaaactgaaggaaggaaggtggacctccttctggacaccagagccagcctcttttctcctctataatcgaggcctccccttttcccatagcatgaggggtgtggggtgtctcataaacactctgatatgtttttctcaaccccttaggtgcagttggggggacatattatttacatgtgccttttaaatcatgcctgaaagtcccacttctttattaggtagagacgttctagcttgcatgtgggccagcatacttatagccccaggaaaaactctttttctcctctagtggaagctaatatcaatccagaagtctgggcaactcaaggaagaataggttgagttgtaaccactatgccagtctggatctatcctaatgatcccacttttttcctaatcggagacaatatcccctaaagccagagggtaagaaagggctagaagccattattaataacctgaagatgcagggcctccttaaaccctgtaacagtccctacaacaccccaatattaggagcacaaaaacccaatgcagaatggagattcattaatgaggccatagtctcaatccatctggtagtacctaatccctataccttgctaatccaaatgcctgagggaactaaatggtttacagtcttagatttaaaggatgcctttttctgcatactgttacatcctgactctcaatacctgtttgcctttgaagaatgcttctggccaaactgcccagttaaaatggatggtgctgcctcagggattttgagataatccctcatttgtttggacaggcattgtcaaaggacctctctgagttttcccatcctcaggtcagggtcttgcaatatgtggatgatatactgctctgtgccccaactgaggaaacctcttgggaaggcactgaaactctttttaatttcttagctgacagagcatataagatttcaaaatctaaggcccagctttgcaaaaccttggtaaagtaccttggtttagtgcttctgaaaggaccagagcattaggggaagaaagaattaagcccatttcctccttccccctccctaaaatcctcaagcaactgacaagattttggggcattacaggattttgcaggctatggatacctgggtatggtgagatagatcatcctctatatcacttcataaaagaaactcaagtggataaaattcatctcctaacctggaaacctaaagctcaaaaggcctttagccagtgaaagcaagccttacttaaggtaccagccctcagcccctctgtagggagggccttcaatctttatgtatcagaaaggaaaggaatgggcatgggaattttaattcaggcctgaggaccagctcaacaactagtgggctacctgagtaagaaacttgatttgcaggtaaaggatggccagcatgcctctgagcaattgccatattggccctactggtactggaggtcatcaaattaaccctgggaaatggtttaactgtttatgccccacacaatgtagcaggattgctgtcttttatggggaacctttggctaacagtccgttggctccttaaatatcaggctctgctgttagaagggtcagcagttctgttaaaaacttgttcttgcctaaacccagccactttcctccccaagaaaactggggaacctgaacatgactgtgagcaagttgtggtacagatctatgaagccagggaggatctcagggaaactcccctggaaaatccagactggaccatcttcacagatggcagttcttttgtagagcaagaagtccataaggcagaatatccagtagtcactctgaatgatgttattgaaagtgcacctctctatccaggcacaagtgctcaactagctgaact

SEQ ID NO: 93678 - DNA, 150131 bp, Homo sapiens
  misc_feature (1)...(150131): n = A,T,C or G
ccacctcggtctctcaaagtgctgggattacaggtgtgagacaccgcaccttgccaataaaaggtttttaaatctattggaaggattttgtgttcacttcaggcaccatggagaaagagagagggctggggtatttgagagaatgggaataaaagtttatacaccttacaaatgctgatacttactatacctgatctagaattcccatcttcccatctggtgccttgaaacagattgtcttctgcctcttctttttcactggaaggaacttaactacttacacctcttcatttgcttaatgatcccacctctggatgttttatttttttcttgatgacttcatcccagcaaattgcccttgtgaactaggattcttcctggtacatatgtatttcaagacagaaatttattctgctgaccatcgaagtgagccccaaataatttaatagcctcacaagaaaggtccactctgccacctgcagaaacttaatacatgtgttttcatcttaaaattcatgtctgtataacaaagaaactcaagaagaaaatgaaggtaatttgaaagcttcctatagaatatcctttataattattcaaaaatactatctgataaaaatatgctaatatttgtgatacctgtaagtctgagatcatggtgccagatatgaaatgggagagatgaaattattgctttgtttcttcaaggaactcacttattcttcatcatttataaggcaattacttaatcacaatattcaatatctgcactttctgtgcaagccaggagttgcaaacaatcagggtatccatatgagatgggtgaaatgtatggggcaagggggtcacgtcgtgaaatattaaacaacttttagaagcagcaagttagaaatacaccagacaaccatagctggattttaaaagtataagccttcatgaaaaacagttagaaacagatttagattaaataacaattacatttacgttcataatacaagtatatgccctatccacacccagagaaaatttatgtttctggggaaaattttatggattaaagaattcagaacttttcttagggttttatatgagaactgagtaatgctgtcatgcagtctcactgtttggacctcaaatttactaatagcttgggtacaggtcattgtgacaaaactgtagtgaaaagaaccaatgatattcgaagcatttcaccattatcttttgtttctcaccaaaacccttgtcctggtataagatcaaatccttaccttaccataggtagcaagatgatcttgtacgtgtagtgcaataaacccattcagggcctggtaaaactccagaggagcatttataatcttcagtggaaggtagtggagacatggtatgaaatcggcagggttagctgcactggaggccttgagtaagtcgtcatttgttttaactatcctaagaaattcctcatcactgtggtcctatctcttgccaaagcaaagggcacagacaatgttggccaccacacaggtgatcgcatttctggggtcaaagctgccattcttggaagtcaactctacaaagactgtcaccagttcagaaatttcttcagtgacatgctcctcaagtgagcaagagcaagtggaggatttcgcttctgcattagaaaaagttcataaggctttagaggcaatttttttatgaagtttccaactctctccataattcactgaaaatgaaagactctttccttctgccaggaaagaaaatgtgtgcatgttaggtctgcctgcaaaatgctccccatccttatgtagtacttgtttcaccatttccattccatttaccaccaagacaggcaccatgccaagtttgaggagaaagacatctccatatttcttcctcatctccattaatgtaaggtaaggatgatctccaagctggagaagattctctatgatggggaaggactaagggccaggaggagacacctgctttctgcccttgctcctgagagctcttacaaaaacaaaaaccatcaccaaaatgatgagagaagtggtcacctctccaggagtgactgccaggtcgagaatcattttcgggaatataacacctaaaacagaaaaatgtctatcttatttttgtagttttagacatatactaagtagcctctctccctttgaacatttagggggaaagtacagactctttgagattagttgaaagcccttcttacctgatgcactgaaagagcaaaatcaaattcttgcaaaatgaatggcatctttatcctaatttgattcttttcacagttctaatcaccagaccaaaatcctgcaagatgagtcactgaccatagacagaagaagatgaaagtcagtggagaaagcagtctggtgacttggaaaaggattaaggctccagcagctgactttatactcattcgggggacctcagtgcctccacttaacctcagtgaatcccagttttctcctctaactatcctacctcacagatttagtcacattctttcagtaaatgttttccacaccccctaatatcaagcactaagaatataaaacaaaaattcacagactaaggaggaaaccaggtaaataaaaataagattagaaagtggaaagtgctataagggaattgggtgcagagtagtttgtcattgtctgtggatcaaatcagattattattttttaaaaagtacttggggacaggtgcagtggctcacatctgtaatccctgcactttaggaggccaaagcgggtggatcacttgaggtcacgagttcgagaccagcctggccaacatggtgaaacctagtctctcctaaaaatacaaaaattagccgggcgtggtgatgtgtgcctgtaatcccagctactcatgaggccaaggcaggagagtcacttgaacctgggaggcagaggttgcagtgagccaagatcacaccattgcactccagcctcggcgacagagcgaaactctgtctcaaaagaaaaaaaaaacaaaacagtactttgtgaattaccagccatttaacggatatctaattggttgtttgcctactccctctgtccttggacttcccaggctgtttattagggtgactttctcaattctttctgctctatgaccatgggtggttaatccaagaatgggccactagcccaagataaatcctccttaggaatagggaaggggactgtgaaagatcatcctttctctgggcagctagatctataacatctaagttccaaagatatgatttggtggtctttcacccatcaggttgacctaagaaagcatgttggaaaaataaatgaagtagaaaggaaagaaataaaagataaagagaggcctcatgatcttacattcaccacttctaccttcaggagacctaggtacactcttgtctctaggttgaattatttcccacttaaactagctagaactggtttctgctacttgtgaccaagaggatcctaaccaaaataataataatagtaatgctttatatacatgcagaatatttttattaactattgcattttatggtaactatagacagaagaagaggaaagtcaatggagaaagcagcctagtgacttagaaaggaaaatttagtatttcctctctcttaaaagaaaacacaactaaactgttcacacttctcaaattacttacagagacaaatagcactgatagatatactcattggctagtgtaaatgtccagctctctttgatttttgagaagaccaacacttcgtttcttctaagctttaaaaataataaattttaataaactgaaagattattttgcaaatagcaatgaatttgtcttccagttcagatgaaagtgacagggtggtaaaaactattccaatttgttctcctagaaaaagaacctaggatcaaaggcatatttatcttaaagaccttacacagcataaatagctcccactattaatattcaagtaaacacattgtcattaatgtgtcttatctaattatttcacctttctttttctttttcttttctttttttttttttttttttttttggagatggagttttgctcttgtcacccaggctggagtacaatggcgcaatctcggctcactacaacctccactcactgcaacctccatctcctaggttcaagcgattctcctgcctcagcctcccaagtagctgggattacaggcgtacaccaccactcctggctaatttatgtatttttagtagagatggagtttcaccatgttggccaggctggtctcgaactcctgacctcagttgatccaccggtctttgccttccaaagtgctgggattacaggcgtgagccaccacgcccggccttatttaatctttctaagcttcatggataaaatgtggctaagtacagtaatttgcttggcattgttttttaagggataatctttggagttaaaattgagagataaatttttttatgggaaacaaaaaaccctgaatacgcatttaaacttagaaaaaataagctgagtacctaatcaatgtaacatccacaatttgaaaaactgccattaactgcaatcttaccatgtggcagatatagcagtaaacaaagtctgcactgtctttcaaaactcacatctctgggaggtaataaatcatcctcctatggggagacttggagagataaagtcattttttcccatttatttcccactttgagcttaataacaaattaccacttatttacatctagtgcttgcccaggagaaaattcaatttctcttgagcatacacaaaaaactgccagtttctacattgacaataatcagttgcatttccaaagctgagtagtgagtaggtgggaggtatgtgtggctggaaaagcactggactcagaaagatgactgtgtttccagcctctcttgtcctctatttagccctggaatttctgttaaattacaatctctgttggcctcagtttcctcatctgtaaaatggtcacgtcagagtagaagatgtctaaggccagctccagacttcaataatgaaagctaaaaggaaaaaaagggcagaagccaagtgtgatgtacattgttaactgcccaacaatactatttttccagagtctctggaacagttagcagttcatcaacaaatgtaagtaactgtgtgatcaccctggattgtattttatttttttcctcagcctgggctcttctcatttcttttactaaattctttttggcgatttaccaggctcagatgctttgccaactttctcagcaacattcttggaaagcactgaagcacattctgttcctggtgttttgaggataaactcaggcagaggacaggggatgtgaggctccctaagggtgggctgctataccaccaaggattcaaagagaattttaagcaatttttttaaaagcctggtgagaaagacatacataggttgaaggtttctgtagtgatctgaagtctagacacacacattagacttccctcaggaggtgttaaacaatagcagtatccacatggaccaattacatcaaaatctctagagatggatgcatttttcaaaagcttttcaatgtgactatggggcatttccagttgaggacttttttaggggaaaactacttgacaggataatcatccaacagtctcagcaaacccactcagtccagttacagcttggaaggctcacctgtgcccagaaatcttgtgggtcagtgtgaggaatctggtgcaggaaccaaaagacagagaaggattttggcaaagctgtgtgtgtcctaagaaacacaaacagtctcttccatagcagcagcagcaggcaggggcagaattttgcctggagggaaaggcctggtgagaacaccccttcctagaagacaggggaggaggggtggacctttgacctgtgtgggaaggagtttggagcctgatcaagggcactgggagcaggaaagaggggtagagaggcttttgtggccaggatcgggtctgggaagctcggagatttcactgtgagtggagtcagagggaaggcatttggagcaaaggcttctgtaagagggagtaggatggaaattgatctttgaagaaagcaagacagaagaagggagatggaaagatgaaatcattttaaaattgctggtaacaaacgaaggtaggatacaaagatgtataacaaggagcagggaaggagaaacagggaggagcgatacagagacgttgctgtgatgtgaattttgaattccttttctccaaactggactttggcaccaggaaaatgtgtgcagctctctgagtggtcagcaagttcaggggcaggaggatcgatgaaacacaaaataaagggaacataggtccactttctcagatgagtttggtagattcatcaggagtcttcaccaaccagacagacctgcatttccacaactagaacagttaacttctgagtgcaatattggtagctttggtttgagtaaatattcccatctgcgccaaggcatttttgcccaatctggataaatgccagtttttctacataatgcaaggttttctgtgtaactgggtaaatgacctgtggttttggaccaccttcttgtcagggtgtctgcaaattattacataatagacttttttgtttgtttgtttttagcattgaagtttttggcttcctaaatattctgagtttcaaggtcagatttaataagagtgcccaagaataatcaatggtagtcagtactttctcacagaggggagaaagccagcccccaaggggagtgctcaacctaatatgttccctccatggtaactttcaggccatgacctactgtgttacttggtgtcaggttcaaaaaaatatcatgggtttctaaatagctagacttcaaaagtcacacaaccaaaaaaatctgacaagagccgacaaaccacaggaattttctkacccactggcagacgttatgctaattgacatttaatcatgtcatacttagctactgctaaaaaaaaaaaagttttactcctaatgttttttcatgaagtctctcctctaatgtaattaaccgcacattggattaatgtataaacattaggtagctctatcaaattatttatgcaagtacccatattatagacattgagaatagctgactaatartgtgttatttaaaagggttcataggagagggtaatgaaaattgccttgcattcccattggttaagaggaaaatccataccacgataataatcgttacagctaatgtttattgtgtgcttacaagcattaggcattttaaagtcatttgtatttcagttatttctcgtagccaacctttgaaggattgctatttttttctctgttttacatatgatgaattctgaggcccagggaagttacaaaatctgttcaggctaacagtgtgtaagtggcggaaaaaaagatttaaaaccaaatattttaatatctgtgccctttgcctttgattgtgccaccttctagtggagaattcttcagctgaaacctgaagcttctactgtaaacaataaccatccttactgatgtgacctcctataagaaactgtcatataagatacatctagcagtacctgcctcagagagtagttaaaagaataaaaattacttgatctctgtaaagcacttaataactggcacatgataatcattcaaaaatagtagtttttgtccacagaagaggaatattstacttttagggattaagtgggcggtactttaaggaggaggtgatatttgaagtaaatttaaagtataaaggggagcttactaggtgaagttggaatgaagcaatctagcagagaagaacattttaaaaggaagagaggttcaaaagaactaaatatggttaagaaataaggtgagataaaagatggcaggaggtgaacatggaaaaaaaatattcttaaatcagaatctcagtgattcctgagtcttcagtctcccttgtagcccacagctagtgacttggtcttgtggattcagccatctacatgtttctcattgtcctggcatttctattcccaattgttgttacctagatctggtccccatcaaatattttctggactattttaatagctttgtatattacattcagcagccagtaagaacaaatggcttaaatgaatagaatttatctttcttacatgacaaaatgcctacatgtgggtgactgcttccwttggttcagtaccttcatgacacttggggtgatatctctgccactctttaggcctttccctttggctgccatatggctgctgcagttctagccatcattatctgtgttccaaacaaaagaagggagaaaagtccatgtcagccccatctgtatcattctatcacttaagacacttgagctttccccaaaaccaccagtagacttctgcttaagttttatcatgtcagataggatgataaagtatttggcttgcaatactgccactgcaaagaaaagaaagggcaattagtaaggaaggcaggtaggctggatattgggagtaactaacatgcctgccgtgcttcagatctagtgggtttgctgctagtctctccccagtcatactccattctgctggtctaatcagttttcaaatgaacaaatctgatcacattgcttattcacttcctctagcaagcacagtgctttgaatttcattcattatcatctgtgactgactcttacctgcctttccagtgtcatcttttgctattgggtcactttcatcttgtactatctgctttgattctctctccttcctcttagtcagtacgggtctagaattttgtccacatttttaagttttaccagtccttatgctgtagtgttcaatgttccctttgcctaggatgtccttacactctacattgtcaacttgaaaacaccagtcttcgagacacacttgattctatgaaacctagccctgctttctccctttttccttccttggctgttggagtggatactgtggtgtcttgccgagatcttctcttcagggtcaacatatatatccaggcagctgwtgggaatttctgctgctgatggttcttaactgcatctcaggaaattttgctcttggttttagaacactccctccctcaagatgttccttctttccgggtggcctacagtcagcaatgatgaatgtagagacacaaggccctgatgttttgattcagtccaaggaagctgtgaagcctcattccagctccacagctccttagaaaatggattaagactttggttgcacccacatataccttgtggattgtgttcaccttctgcccaaattgtctttctctatttcctcgaaagtgtatcttttgagagttctcaatgaaattttgacacaaaaatttccattctggatatatttccagaaaacccaataaaaacagctctctaggcatttgtgccaaactaaatatattcttttgggcaatgctgcccatataatgatatttggcatatttgtaaactgactgccccctgcagtcagctctgctatggaagtctggactctcacgatactagaaggattttatacatcttgcatttaaaataggaagaaagattttctagagaagatgctgttaggaagacttgccactacctctccccacaaaatagaaactttaatatttctccttttgtcttatcaaaatggcaatcataaaagccacaactctacagacacaaatgtctgtatctgaatgtatcaaatttctgtatacagaagacttgcattacttattarcattgcccctccatcctgatcacatgcacatatgtccaagtccactcctctatcacaacacacataaatacctcccacatatacacacagcagtgttcttgacagtgagtaggagatactcataaagtctcaaatatagaccacccgtattggctccttttagaaaagcagctttaatccctcttgctcgttatgcatacagaaaaaaacccatttgctgcaattctgataactgaaatagagtttgatgcaagaacttaaaggtaatcatacgtgaatgaagtatggcagatattagctgcctttgtttctttgcctctgctgcgatccaaccattttttaattaggatgtggaatgatgaaagctaagcctcatgataactatttgggggctgaaatataggaaaagaaagcaataaaatatgagttttatgctactgttttggtgttcaggctagattcctcagaatgatacctttttggaagaatgtgccaagaatgtttgtcaacaaaaacctcctctggaagtaatctggctgtctacatctgggatcaggaactaatgagtccatgaataacttttttggcctgccattctgttggtgtctgatatgtctgaattgaggaagaatggaatttacagtttgttggtggattactatgacttctatcaggaacttctgagaacaggtagtaattgtgcctgttatacttcgtgcctgtgttagacaacaatgtcaataacgaaacaggatcacaaagccttgagagaacattattctgttcagaaaaactcaataattattcagtaatatcttatagaaaaataaaaatggacttcttccttacatgttacaggtatttgtatatacaggttggcaaatctatacaagtagctaaacaacatgtttctacttttctaactgagtagcttacaggtttatactgtaacatcatgcttctacccttggacccaaatatccaacatcttggaatttatcttgaagagatcattagccaagggaattaaaatgcatgcacacaaaagctactcgtggcattgattatgacagtgaaatttcaaaaccacctatgtttctttcaatatagcattttacataaagaacactttgcatccattaaaaatgatagcactatctcaatatttataaccatgaagatgtccctgccactttgctgagtaaaaaagtagacaccacaccacatgcgtaggaaggaattatctatataaaattatacatgcacccaaacacatacacatatatctgtaaagagatgatatctggaggcatgttctcgtgtgttcatgaagagatttgggaagatatttaccttctcttcatactttgcttgtgttgatttttttttacagtgagcatatattattctgttaataaaatgttgatctactttgatttttaagtcatgcttctataaatcaaagtttttatcagtatgtccatttctgtccttacaacggttcacttatttttccttattgtaatattgcttgtgtagttctcatagttcagtgctaaaactcttaacattatttgaagatacaaagtcagtagtatgcaaaccttcccaggaaatgatactgacacacatagattcccaggaaatgctactgacacacaatggattctgacatgaccagcctctataataagaggaaagtgtggtccctgtacactagctttcaaaccaatgggaaaatacaaatgggaccaacaagcctgtcttgtcatgcttgtatgatagacatggtggtatcaaaaggaaataggggattactaatgccaaagtatatagaagaggaaagatagcatggtcctagccgattgtctttgggaaactcatctatcttttgtgaatctcttcatttttctcatttgcagtttgctgtgatgactagaaaagtatatgtcaaatgttgacttataagagggtctcaattaatgaagttatgattgctatttttattaatattgttgctgctgctatattgggaaacgtaatattgaaaatcacatgataagttttatcgatgtactcatttgaaatagataattcatgtaaggaaaaaaagtattcttattytacaacacaggaaattctcatttttcttctctttttttttttttsagatggtgtctcgctcttttgcccaggctggactgcagtggcacaacctcagctcattgcaacctccacctcctgggctcaagcaattctcctgcttcagcctcccaagtagttgggactacaggtgtgtaccaccacgcccagctaattttaatagagatggcattttaccatgttgcccaggctggtctcgaactcctgacctcaagtgatccatctgccttggacacccaaagtgctgggattacaggcgtgagcaaccacacccagccacttttcttaaaaatataaaatattaccaaatttttactttttaagttataaggattcagctcaagagttcttttatgtcacttatctatgacgaaatataaattttaatttaacaccccctagttcattccttggcgactccaatttttccattgcagaaatcacacaaataagtttgccttcagataaacaacacttgattcgtggcatatgctctactgtgctaaactttttactctgtctcaatttctacaaaccacaaacattttctttcaaccattttttattttttataatataatttttataaatattttttattttggtaaatttcacattagtaatgtgaaaaattaccaatgaacattgcacacatcgaaagtgaagacgaaaacaataacaaaagggagttcactgaatgttcatttacattttaaataataaacaacatgcatgacgtgatttttaagaagtgaaggcagtactaataaattcctctttaatttttcatgtatgtgtgttcaggcttgtcaagtaaatcataatcacatgtgttggtttgtgatgcggtttattagcttcatatgctctgtatctaatacataggaccatagcaaagagaacaattctattctattttacaatagcattggaaagaagaaaatgcttaggaataaacataactaagcaggtgaagaactttcacatcgagaactgtaaaacattgctaaaagaaattaaataagaaacaaataaatggcaagacatctcatgttcatggatcaaaatcccaatggtgtttttgcagaaatagaaaaatccatcctgaaattcatgtgaaatcacaagggaccctgaagagctaaaacacttgaaacagaagcacaaagttcgaagtctcacacttcctcttttcaaaaagtacacaaacctacactagtcaaaacagtgtggtactggcataaagaatgtgtagaccaatggaatagaagacagagtcttgaaataaactctcacatatattatcaaatgatttttgacaagaatgccaagattattcaatggggaaaagacagtctttttagaaaatggtgctgagaaaactggctatccacatacaaaagaataaatttggacccttacaccatgtacaaaaattaaaacttaaacataacagctaaaacgataaaacttctataagaaaacataggtgaaaattttcatgacagtgggtttagcaatgaatttttggatgtgacaccaacagcacagggaacaaagaaaaaaaaaatagaccaatttctcctttgccaatattcacaaacttttttgtattaaaggacactctcaacagagtaaaaaggcaacccacataatgggagaaaatatttgcaaataatatatctgataagaaattcacatccagaatataaaaagaactcctaacaactcaacaataacaataaaaacttggtttaaaaacagatgaagaccgaataagcatttcttcaaagaaggtatacaaatcgttaataggcccatggaaagaaatgctcaacaacactaatcatcagggaaacgcaaatcaaaattgcaacaatgagatattgcttcatacccattaagattgctattaaaaatcaaagcaaaagaaaaacaagacaggaaataaatgatgttggcaaggacacggagaaactggaacttttgttcattcctgatgggacgtaaaacaatgcagctgctgtggaaaacagtatggtggttcctcaaaaactaaaacattgaattacatataattgactagactctctctgacctaactttagttagtctctcttcagccctctttttaactagctctcatctttggggccctgtattaggcctgcctagtccaactacagcaagagtcctgctaagtctctttagagacaatcccccacccttgatatctgatcacccttgggatctgatcaagttcttcatcccccacatttgatatcagatcaccacagtctggcttcagcaagaattctgttaagtcaggtgagaaagaaccaccttaccttcatgtgtcctcttagtaattttctgtccactgactcagtcactctgctgattgtctctggacacccagctgtccttgctgtattctctctcccctaaggcgatagtcttgccacctatcgcaacagtccaaagttttctttaccattttcataagtttcagaacgatttttttctttaacatgatccaacaattttacttctgggcatgtatcttaaagaattgaaaacaggatttgaacagataatttgtacacccatgttcagccaatctgaatgcctactgaaggataaatggataaacaaaatatggtatccgtaagccatgaaacattattcgatcttcaaaaggaagaaaattctgacacatgctacaacataaatgaaacttcaaaatcctatgctaagtgaaaaagccaatcacaggaccaatattgtatgattctgcttatataaggtctctagagtagtcaaattcatggagacaaaaagtagaatgatagttgccagaagctgggtgcgggggcaaatgggaaattattgtttaatgggtacagagcttcagtttgagaaaatgaaaaaagttctggagatgggtggtgatgcctatataacaatgtgagtgtacttcatgccactttaatgccactgccctgtatacttaaaaaatattaaaatggcacattttatgttaagtatacattaccagaatttgaaaatgactgaaactctcaactgaaaaaaattctgcacacattgggcttcctttccagtttataacatcataatacagttccatgttacatattatatgtttctcattcagctgttgctgtggaataactagagaaactgggcatgtggttaaacttcttttccaagcatctcctcttgttgattgcaaaaacatttctttttagcttaatcctttattcatgtattactgctaaacattttagagctgagtaaaccaagactcttttttaatcctttattttaaaatggcagcattagaatatttgaaattttcttaaatgaatataaaagtcgctcttcttttataaagacaattttaaagaatacttgacctgaggagtgcttactgttactacactaataagtctggattttacttgaaaatacagtgaattggtttagaaggctggaaacaaactgaagaacacatctaattcgtctgttctaagaaggactcactcattttaggaaaagatggtccattatgattttattttttctaagactctaattagagcctattctacttcttaataatactattccagtttcaaattgcccatgtttaaccatgtgctcttaataaaatttatgctttttattcttcctacttaggaaataatacagtctgttaacataaaacatgtttccataaacgaaatttgcttatatctgctagaggaatcgtgtttttttgtaaagaagaagtaggttcactraatttgtgatttccactaacatattaatgttttgaagtaagcaggggtaaactttttctcagttaaagagaatcattatcagtacatgaaaatgtaaaggaggggggaaagcttaaatcctgaaaatcctccaatagcctgctgtccacctagttagctatttggtgaaactaagagtgcacatgaagactctccaaagacagttactcttgtgttaaaaattttaaagtggtgattaagaagtctatttttttattttgaagaaattgttccattaaaaatgaaggacctctttgagttacatttggaggagaaactataagcccatggtaaaaggctgcaaagggtgaaactgccactggaggtttaactgtgttgaaatttttattgaaatttttattggaattttagattttttatgttagtactctgcttacaaagaagagtatgtttttaacggcctgcctcttgccgtgtttccccacccctaccaccaataagcccttcagtgcaccttttcacaaaactttagaattctcagcattgcatacattatctcatttaatccttagtaagagctttttatgttcagtataattatgccttttttttttttttttttttttwatgagatagagtctcactctgtctcccaggctgaagtgcagtggcgcaatctcggctcactgcaaactctgcctcccgggttcaagcaattcttctgcctcagcctcccgagtaggccatttttttaaagaacagttgactgtggtccaatggtatatttgcaagaatatattcatcaaacgttttccccaaatggtaacatttcatttcaccttagctttatcattttctttctctaaatttttacaggtaagtaacagacatgccaccctgttacctctatttcagagtatatttccaaaaaatgaaaaaattctcttatataaccatagtataattattaaaatcagaaaattaacattgataaaataatattgttttctttaatttgcctaataatattctttatagcagaagcacgttgcatttagtcgtcgtgtttctataaactccttcaatctagaatagttttgcaagttagcctttgtctctcataaccttcacacttcagaagagtacaggctaattctttgttaggctgtcgttaaatatggctttgtctgttgtttcttcatgactaggttcaggttgtgcatttttgtcagaaaaaccaaatggaagtaggtagctctacacagttgcacagccaattaaagttggggccaggatttgaatttcagcaggaatcccaagactacattctcaacctccactcataacatcacaaacaattactaatttctcctaaggtatctttaacaaagttaatggtttctgtaaatatcactgaaggtttgctctagcctctgccacatgatagaatgtaagagcagggaaatcaaatgacatcatagtgtaaacccattatagaatccacatgtttattatctattacgtgggaaatgcaattcaaaaatttggactgatggaaaactttatctaaatctattttgtatgtcttgtgtcaccaattatatggtccctcacttgcttatttggcttctgtcttggtttctgtcttaaagacttgttacataatatgaaaatatcagttttactctatagtatttcaatttacattttctaaagaacataatataaaccgaatcaaattccagaaattcaactcctgaaagctttgtgcataggtggcaatttctatataataccctgctttcctaattatttcaaaattcaacaggttagctaagtagatttaaaaaatagtagcatgagccaacattaatcataagagccctaaagagagacctgtgtattttcaaattctatgtgccttgggctactttttctaatgtcaccattaccatgcaaattgaaayttaaagcaataatcacttaatactgtaaattatttttgatgttttggtcatgagtatccttttcctttttttcttttttctttttttttctttacttgagacaggatttcattttgtcacacaggctggagtgcagtggtgcgatcatagctcactgcagctttgaactcctgggctcatgcaatcttcccaactcagccttctgagtagctaggactacaggtgtgcaccactacatccagctttttttttttaatttttatttttttgtagagatggaatctcactttgctgcccaggctgagtctcaaattcctggcttcaagtgatactcctgcctcagcctccccgaagtgctggggttacggccgcgagccaccacatgcrgccatgcatatctttaaatgcaaacatgttctacaaatagaaacataaatttacaccggatatcctccatcataaaatttcagtttgtgtattcttaaaatattatgattgacttgactggtaaaagtaagaagttcctgaaaataagcacagcatcttgatataaagtggtattgcatcaaaaagaataaataaggaaattatccaattctgactataacttcatagtataagaatcatactgtatctcagatcctactgtacactttctggacctcatcctggaaaatccatggtgcccattgagaagaagtaaggactgatatacagtgacatgtgtccgttttatttagtccactgttttcaaagaggagggtttgactcattataaggtcatgataagtgcctttaaaaaccaaaataaaacaatggaaaatatctcaaggtgtcatatatagtaaatgtaaatattaacgtaaaatttggttttagtgtgtgtgtatacacctaagtgtgtgtctgctcttgtgtacactatggaaagggaaaataattttttttactatgacataatccagagaaattgaaagccactggtttaataagttttcatttcaaactgattctttgcagctatttcctacaagaaacaaatgtgatatattttattattcattcattgtctctcttttctatccatattatgtatttttagggccattttcaccatcctcccaccccaggcaatacacacagatagaaaaatgcttcactaggaatggtcttccctatgcccaactttctcattaatattaaagcagtttcagccaacatagtagttatttatttcagctcttagagttcttccttccattggtaatggccctaaatcttttcctatctgatgaaatttccctgaacaaaacatcgatgtttctaatttgatcaccattatatactgagttcctaccaggtagtataggctgtatttgttaaataaataaatgagtaaagacgtactaataagaatgatcctacctaccagtataccagactttcctaaaatgtcccttgctactaaattgttaaatgttaaatctgattctcacgggactaaaagcattctccccttagattgtctaatttaagaggtaaggtagagaaaaggctgtcttcctgattgcaaatatgttaggatgggctgcacgttaaatctggctaacaaacatgttttgttttggcccacacattttaattaatatcctatattttggtattagaaattgtctcataaaattcggcttgttttgaaagatcctaaggtctgacagtaggtccacagttggctggagacagggtggctgatttatttagaaraaacgtgtgtgaatcttccctttttgtttgtctctactactaagttgtgagttccttataatcctcatatcatttttattatgcagaactcaagatatatgtgtgggatgaatgcataaataatgaatgggccagaattcggttttcaggacagttttcaagatggcttaaataggcatagggtttatttttctgtcttctttctcgctgcatctagagtttgtcccacagaaatcttatctaaactcatgactttaactatcatccctaccataaggcaaaatctccaactctgccctgtcacccggactctaatcagatatctctaactgtccctcaactcagacwttctgagtcaaaagtttaatctgttatctcaccaaaacatgcttcccaactgactgcccctatatagatataggggcatatatgtacgtatattgttttgaggcagagtcccactctgtggcctargctagaatgtagtgrcgcgatctcagctcactgcaacctctgcctcccagattcaagcaattctcctgtctcagcctcccgaatagctgggattacaggggccagccaccatgcccggctaattttttttttttttttttgtatttttagtacaaacaacgtttccacatgttggccaggctggttttgaactcctgacctcaaatgatcctcctgccttggcctcccaaattgctaggattacaggcgtgatgtcaccacaccaggctgccccaatgtttttcaccactgtcaccgtcctcccatgcatataatcttgaagcctcagcaatttgagattcttctttcttcctcatcagccacattcagtgagttatcaagtctagtttattcattcttcaaaatattgaatgtctcttttttatcctcatttccttcctctctccaagagcaagttttaccatcttgataaacagacaattgttcttcctgcctcaagcctcttgtttttcaatacagatttatttataatattaacaaatatttatcaaatgcccaccatttatttatcaaatatcctatcttagaagttagggatacaacagtaaacacaagcaacagagcccctaccctcatgaaacttacagccagttagtgatacaagcaaacagaaaacacatatataataatataatgtcaggtagtaataaattatatgaaaaaagcagagtaagggaatagggaatgatggactagagaggtacaactttactttttaataataacacctcttttaaacatttaaatttacatgtacttaagagaaatttatagcatacattttcccagattaaacttcctgaaacatttggccatatgccacttctctattcatctatacaatcattcatctataaaataaatgggataaaatccaaagcacttagtgcaaggttgtttaatctggccctaggtactctttcttgcttttagtttatacagataaaactctaacaatattgactattttcctgcttattatgcttttctacatgattcattaaaagcctctctcctctggcgattcttctctaacaataataatctctctgttctaagtcattcagtatggtacggaatctacttgtaattaactgtctccttgtggctatttcatattttatctttccagctgagtgacacacttttgaaaaatgactgtttgatattacctygtactattctcagtactgactcttctcaaacttacaaaattgttgacattaacttaacacatatttgttaagtaggtgttgactaaccaattacatgtgttgaccacagtcagcctttgtggtctctctagccacaacctaacatcctctatccttttcttttggtgacattaagcctatatctgggatagaatcattacttgagttgcctacgtatgccatttatttcccgcttcaaagcagcgtgtcactataactcaaacagatcttgtatcactgcgttagaatgaaatactttttttaacaggatgccagcttttcacacttgccgcaagggggagcagcagttcttttccaggaagcggaatgacgccatagtttcattccccagcaattacccaaacatttaattctcccccatatgatttccatacatctttgtgtttttttctcctgcatgtatttaccacaactaaagggacagtccctcttcactttaaacataaatttttattttagttcacttgattttatccctctaaccacttatacttgaatttctactccggttcttaatttctttattttaaattgagctcartatctaaaatggcgccagtactttttgggaaatatttattgttggaggcaatcattgaagaagatatcagaacaagtaatttmccaatgaatatctgacatgcacaacagataacatatatttttgttactcagyttgcccatagtgttgagtgaaggtaggtatttaacacttgccaaataggaaatgttcttaatgaaaactaggaattccaatactgtatatatatataccattctagagctagcaggactattagaaaaaatctggaccaacgtcttctagtttacaaataaggacagtaagtcccagaaggtcaaatgactaagttagttcaagggctcattctgttccaatggtctttctattaagttccactgtctctcttgtgatattaattatagaaaccggcctgtagtttcaacatacagctaaaatagttatttccaaaggtctgccaatattatgctaaggatttttataaaaatgttgttttgggttctgaatactacaaaacatcttgtgctcacacagtgctaaatattaccttgcaattgttacagttaaccaagcagttctgtatgtgccaatttggaggcttaggtggggtgaaaaaaaacaagttaaataaaaatagtagcaagagaaatattgaaaatattagkaccacatagtatgattttccttatgttaaaaaagctatataaatgtgtaaatgcatgaataaagttctgtaaagctatacggtgggaactgtgaattatgatactctggagagagagagggagaaggtgaaatgccttctagaaggtgcaaaaattggccccatgggattcactccagtcagtgggtcacatcaacactcccagaagctagaccactgtctgagctactatacggccactgtcatgaagatgttttagaataaggtattgatggagatggagagaagtggctggtactaagttctgaataccacacagtattctgatgctgtgtctaccttcataatgtttgagttttaacaacaaatatgcatacattttgagtttatgaacaactagaaggcaaaaatcaaaattataaaagaaaattccccattagcattactaacaaaagatattacttatataaaaggctgtttaactttataacaagatatctattattttcccactgaaaatatagtcaatcagtgattaaccagcacagtagtaagagctcaaaattcagctctatagtagctctgtaatggaataatagctaagtaagagtggaactgttttgcagccgtacttaaaaaagtcttataagatatttcctagtagatcaattacattatacctgctattcaccacagtgaatattctcaagagataaaggtatttaggctttattattgttggttaagttcaggctgtggaggttttctctttccacgaacacttggctcatgacaatggccaagccctggaatgctacttctaggcagccatgtatagatttcttataatatttttatgtccattaatataccatcatctttgcttattaaaaatgtaattatattaattattttcttttatataaactgaactccatagtttctcctttctaaaattagaatgtaacaaaataattttgaactcaaatacctattctttgttctttatatgatttcggtttattttattaaagggaaacctttagccactcaatttcccctaccacaatgcctcacattgccgtaaaggaaatggtatttcagtctccattccctaacacagaacagtatcagaacaaacacttctggctcctccctctgccttgccgtttctcccttggatagagaaatagcttgcctgtttggtaaattcagtgagaatctggcattcactggtgatagcttcctatattgggggagataattggtgttgaagttcttgttcatgaatagccctgaatcttgtctatttctttttctcttggagtggtccatcatcagtggaatatgttttcctcctccagctcttctgtgtccatctgatacctgcctgtagagcactcctgcctttctctagtttctctgctttatgttgggggagatcgaatcccaaagagaagaagtcttcatatctaatgttttcagaataattctgatcctggactttcatctttatttatctcttagggttggttctaaattttttaataacccgcaggagaagatgtatatgtaattagaattctttaaatgccagaattgtatatccaactttctaatatatatcttctcttggatatttaaaagtaacttcaaaattggtacatccaaatttaactcataatctcctccccagagtgaaaatcaataagcaatacactggtcctccttcaaccatcccctaactcagtggatgatattgctttctctctggttgcatgagccagaaatcacaagtcttctctgacctcttttctccttcatttcacatatccaattaatcactaaatgttttatttttcctcttaaacaaacctcaagccagccacatttctccatcactaccacaacaccttattctaaaacaccttcatgacagtggccatagtagctctaatggtggtctggctcttaggagtgtgggtgtgactccctggctggggtgaaacccatggggccatgcagggaaagagtcattggcccagccatgatacacaacatgaaactggacaattaaggactcataaattgaacaaagattacaaattggaggttaaaagaattacaaaaggatatgaattatttgtatgccaaaatattagataatctaaattaaataaataaattcctagaaacgtacaagcaattaagcctgtatcatgaagaaaaagaaaatttgaacagacctatgactagtaaagagattgaatcaataatcagaattctccccacaaagaaaagcctagcactagatgtcttcactggtgcattctaccatacatttaaagaataattaacaccagttctcttcaaatgtttccagaaattgaagaggagggaacacttcaaagtcattatatgaggctagcattatccaaataacaaagccacacaaagacactataagaaaactacagattaatatccctgatgaacattggtgcagaaatyctcaacataatgttagcaaactgaattcaattgtgtaggtaaaggatcgtgcactgcaatgatttggtttgtttgtcccctccaaatctcaggttgaaatttaagccccaatgttggaggtgaatcctagttgggaggtctttgggtcatggggctggattcttcatgaatggcttaatgccgtctttgtggtaatgagtgaattcttgctctgctagytcccacaagagctggttgctaagaagagcctgataactctttctcctctctctctctcttgcctcctttctggccatgtgagctctgcacatgctggcttcccttcacctttttctatgagtgaaagcagcctgaacccctcatcagaaacagatgctggcactatgcttcttacacagcctaccaaaccctgagccaaattttgtttataaattacctagccttaaatatccctttatagcaacacaaatggactaagagatataccatgaccaattagaatttatccctggaatggaacaatatttcaatatataaaaatcaaacaatgcaatccaccacatgaatggaatgacagacaaaaatttactgatcatctcaattcctatagaaaatgtacttgacaagattcaacaagattttattaaaaataaaaaactatgcaataaactaggaataaaagcaaactacctcaacataataaaattcatatataaaaagcctatagccagtgttatacttactggtggaagactgaagatttttcctccaagatcagaaagaagacaagaatgcccactttgccacttctgtttaacatagtgctggaaggcctagccagagcaattaagcaagaaaaagaaatcaaaggcaaccaactggaaaggaaaaagtaaagttatctctgttcactgatatgattttgctgtagaaaaccctaaagattccaccaaaaagaaactgttagaactaatgaatgaaatcagctcagtggcaggatacaaaatcaacatgcaaaaattagttgtgtttcyatacactaacaaagaacaacctgaaaaggaaattttaaaaattccgtttacaatagcatmaaaaaaaaaaaaaaaagaaatacttaggacaaaacctaacaacgaggtgaaagacttgacttgtatgccgaaagccacaaaatgttgctgaaaagaagttamagaggacacaaataaatggaaagacagctcatgttcatggattggaatatttgatatttaagatgtcaatactaccaaaagtcatccataggtttagtgtaatctctatcaaaatcccaatggtattatttgcatacataggaaaatccatcctgaaattcatttgagattgaagggacctaaatagacaaagcaatattgaaaagaaaaaggttgaagatctcacacttcttgctttcacaacttattacaaagctatagtaatcaaaacagtatggtactatttagcataagacagatatataagccaatggaatcaaatagagagtccagaaataaactgttgaatatatagtcaaatgattttagaccagcatgccaggacaattcaatgaggaaaggacagtcttttcagcaaatggtgttggaatattcacatgcaaaagaatgaacttggatccttacattatatcatatgtcaaaattcaaaatggatcaaaggacctaaatgggagagttaaaaacataaaattcttaaaaggaagcatagtggaaaactttatgagattggatttgttaatgatttcttgtgtatgacatgaaaatttcagggtacaaaagaaaaaattgataaattgtactatgttattcttaacttctgcgtgtcaaagggcactgtcaacagagtgaaaaagtaacctacagaatgagagaaaatatttgcaaatcatatatctgacaagtggtaaatatcaaaaatacacaaagtactcgtacacctcaacataaaaaaaaacccaattaaaaaatgagcagaggaactgaagacatttattcaaagaagatacacaagtggccaataaacatatgaaaatgctcaacatcactaatcattagtgcaatgcaaatcaaaaccacagtgagataccacctaatacatcttcatctctcatctgaactactgcctcattgcttcataatcaatctactaattgttcaatgagttcaccacattataacaagaggcatcatttccacacaaatgatggcattctattactttttcacaaagacaaaactcctagcacaacctgtaacagggatcaacaaactttctctaaaaacgataaatatattaggttgtggtgagccttatggtctctgttgcaactgttcaacacagctatcataacaaaaaagcatccagaggcaataggcaaacaaataggttttattaaacaatgaaaatggctcttagcagagaggagagctggagaggggacaggatgggcaggtcatcttcccccgaagtcaggtcatctcttccatagtccactgcctcttccctgaagtttggccatctcttccccaaattccagttgtctccttgaagtccaggcatctccccctttatttactgagtctgggctctttataggcacaggatgggggtggggtgggccataggtagttttggaaaaggcaacattcagttggtaaaaggacattattcagaaaaaatcaatcaggagagggcgagcaaataggaatagaagttctaacttttggccagttttttttgtgtttgttttttttttggtttaaagctaggatttcactggacagccacccctgtctgcctagaatttctcttcctcctacctctattaacatattgtaaacaagaagctacagctaaaggctagatggattataaattaatcatttgagtgctacaaaataatatgagcagtattatgctgacttttggtataaagtatataacacaaatatgtgtatatatataatagagggtatctatatggatgtttaattttgtcagatgcctttagagatgattatataatttatcttcttacatttattaatatttatcccaataatgaagcacttttgcattccgagagtaaaccaaatctcattgggatatattaatggtgtaagattctattagctaatattttatttaagatgttgacatcaatattaatgtgttattatcctataatttattttttcaattattaattttaaaaatcatcattaatcttttttcataaaacaaatttggacatttttatttcttttctatgctctgaagctatttaaataccactagtattttcttttcattaaggttggtgaaattttcctgtaagcattgtttttgctgcatcttataaattctggcatataatgtcttaattattattgtttttagcaatgctgaaattttgtttgtacttcccttttgactcaataattatttgatggaaatgcttatttccaagtggaaattaattgatcctttctaattagttgaactgtgttcagggaatattatttgcattgtctattctttggaatgtaatgaggtcttttatgtgatctaatagaagaccaatttgggtgaatgttttcataaatacttaaaaatcagatatatttgttattattgaggtacctatcttatctttaatataaattgtagacttcttagcattatagtgttttcttcttaatcttgttaaattatttttaggtggaattataccttgcagtgttatcaatctagtagtgttatcaacaatgtgactttttaatatattttcctggaaacatattgtccatactttcattttaaactttctgtattacttttttaaagccatacttcacattacaatgtggagttttgtttctgttttgtgaaccaatctaaatatttgcatttagtaagttaaaaacaagccatttacatattgctataacatatattttaactggattctaccattttatattatattgactataaacatatatatgatatgttttttttgctcatttttggcagttctggtattttggaagattttcattttctttcttttctttatgttttgaagctttttatttttttgtctttaggtcacatttccaaaaaaggacttctctaacctagctgggacattctatgccatgactctcaatcatttattccttttatgttttctcatattataataagtatctgaagttacctcattggttattgatttaataatttattggttctggctggacgaggtggcttacgcctataatcccagcactttgggaggtcaaggcaggcggatcatgaggtcaggagttcaagaccagcctggccaacatagtgaaaccccgtctctactgaaaatacaaaaacttagccgggcgtggtggtgggaatgtaattccagctactaggaagactgaggcaggagaattgcttgaacctgggaggtggaggttgcagtgagcagagatcgtgccactgcactttggcctgagtgatagtatgagattccgtctcaaaaaaaaaaaaagaaaagaaaaatttttggttcctttctactataaatttcttcttatcagaacttctctctctctctctctttctcactcactcttgctctgactctttcttcatggtataattagagcttgcaacagtacacattgggtaacagaagatagttaataaatattatgactgttaattgaagctactttttaaatttctttcagcatacttttcctagtagtgcctcactcattttaggcactcagtaaggatttgttaccgctaagttgaaactgtgaagactatagccttatgtaaaatgtaaaatattattacgataatgatagctaatactcatggagaatttactgtatgcaaggcactgctctaagccctacacatttattaactcattaatcctcacaataactgagtcacagagtggttaagtaacttttccaaagtcgcagagctggtagatttgttgatattagaaggtataaaggctataaccatattgaagatgagaaatgtcagaaataacgtcatcttaaaagtagaagattactactacactaatactttttttattattatatcttatttatgattcttatctcctgtattatattttaagctttcttgaaagcaggcacttttaaagtcctcatagagcatagaagggtgctaagttaatagtaaccagaaaagtagcttatattttcatgatacttactatatgccagacttactgctttaaatatattagctcatttaattcttgcaagagcaggtactattatttttcccattttacacatgataagttaaagcacaaagagattcaataactttcctgaggttacacagcttgtaaatggcaaaagcagaatttgaagctagccaatctggtccaaggtcagtgctttaaatcattatgctgtactactcactgagtgcttgtgactgattagagactccagtgatatgtatttcattacaggtttataagattctaggcatgatttctccacatgcttatctatccaagtctcagatttatacttttagataagccacataaaaacaaatytgaggtgttagtgaatcatactaggtgcattaggaagtacatttacaaacatttacaggtttcagagactatggtttatctttagataacatcgatcatttaagtaaggtcaaatttagattatttttgagaatcacagcaatgctttgcacttattcgatattgttctttaaccactcttctctagatacaatgtaggcaggatattactaaaaatgaccacaaatttggaaacattaatattttgaaagcatacttgccaaaataaacatcccaaattagatatagctattttactaaacaacattatgattcctcttcagaagtattattgtttaaaccactaccaatttcttttatttcctacagaatattaatttcataattcaaaaaaagaaaataagagatgattaagtgcaaatctcatcaaggcaaaacttgtaattttgcccatattcctgaccacaactatattaagagacaacaacaacaaaaaatgttttccaaagaaacagaagcaagtgtttaaaaacaataaccacaattacacactactgttgaatcaagcacatgtataatggggcaaaaatacattatagccaccaaaatacatatttcattgtttgtgacttactagatcaccacaaatagatctattaatatggcattggactcacataagaaactagtactactctttaaaattaaatgaaaagattattttcttatctacatatatattgcatatttagtattataatagtatttatatacacataggatacatgtagtatttcagatcaatagcattttacatattttatatatagttttcacatagaaatatataaaaatcatagagtataacataggagaatataaaaaattgttactagagaaaaagaaagatattttgtaatgatcaaaagggttaaagatagttaaaaactagaaggaaattaaccatttacatctttgaatgctacaaatgcagaataacttttttctcttaagtgtttctaatgtttccttaatttctagtatcagctggtataacgtttaaaacattacacagtgttacaaaattctgctacaaaaaaatcagataaataattatttatttgagaagattagcaatttgaagtagcaaacatctcctaaatgacctgaaaactataacccgtataattccaagtttagtatttggtttggcattaaataagtttcagcaccccagtaacataaataataaattcatagtacctgtattgaaacacttttataaaattcagaaaattacatcaaataatgttctacaatggcacactaaaggaatacaggaatatcatatcatttctataatttgacataataactagcaataacaggttaacaatattgccctatcatatataagcaatgtacacasaaatttataataactagtccaagtaacataacttagccttatggaaaataactatatatgtctgaatgggagaagaataataaaaagtaaagggtcctaccttctcaaaaactaaaaccgaaaagtattttccatgtttaattaaattattttggtagataacagaccttccctactgggttaaatccaatcacaactttctaggccaacgattaacagatgctgacatcttcattcaagaacagccaggaaaggtgtatgcattccaaaaaaaagaaatttaaagatataaagcaatttgtagaagttaatatcattatccattctaggcttcttattcttgtcagagaggagaagtgctttcttctgggttgtctccgtcaattctccttcttaactccataggaattcaaggcttaaagttctttggctyttaaataaacatatgtcttcataggtggggaggaggcccaactagcaattttgaatcatttccttacaattctcagaagttccactttggccagactcattaaagagaatgacaaatttctatctttaacaaatttcattttaggacagttcttttggggcggggaaaacaagataaaagaaaaaatawcaacaagtggaactgatatttggacaagaaaggaaagaaatattggaatttaaatggaacatttccaggaacaagagcacaagcatactttctcatcctcttcttgctcttcagtctgatatggtgatccagatgggacacccacttcccagttagttgattctagccatgggcttccatcctctgaataagggcatgggtttctagtctctgcatatggaggggatcctctcatttcaatgtgtggaccttcataggatggagtaggatacgttttatctccttcactgtgtctgatttggggaccactgagttgaggtgtaagtgtttgcattgcaaaagaaaggcaaaatagcctgaagataatttcatcctcatgagagactttttgggctccctacaaattcttcctgaaatagctgatgctgactcacttgctctgggaacacatttattgtgtccaaatttttcatggcacgtgattatgagatcttagattagtaatgttgcttggcaacacaacagcatccctagactttttcaatttgacttacctaaattcaagtttcaaacttgcagaaagagcacagatggctttaagatttagcattttatatttataagaaagaatatatgtgtgtatatatatatttgattcaaatttatgctccagcataagaaattccaagtttttctgctaagcaattccatttatatctatgttgaatgtccttgccatttcctccagtctacatcccagctgttctcatcactacccacattcaaaaactctctcttcatatgcatttttagttataatttcttctccagaaaggaatgtgcaataatccgagtaatgtcttcatattcacaccataacatgataaaagaaggaaggaataaaggaaagaaggaagggagggaggagaaagacaagaaggaagggagggaaacagacaggaagggagagagaaagaggaagtttgcatcyaaacttttattcaagaaattgatttttttaatgtggccaatacttctcttaaaataatttatatagagagtaaatatgtctaagattcaaacacaatataataagggtagagtggacatttcttcacaatttggcataacaataactgcaaacaattttcaacaaaagtatttagcacagtattatttattaatgcaagttattgaaaacatttaaaacatttcaaatgtgtcagygtatgtataacaagggcagtagaagcaaaatttataaatactgtgatcatgaataattttattttattcttttttataaattttccacaataaatacacacaacttctgtaatattaaaaataagccagtttaagattcttttataaatgttgtgcagtagagtaaatcgatgattagtttcattctgtgctgattattaagctactccgtgtcatgtcctatcttacccttctggcttagttttctgatactgaggttgcaactctgcaaataatcttaccccctcctagctgctttcctgttaaagcctaccaatgaaggagctaacggaaatttaaaggcagaaataagagaaggaacatggtcttcctatttgcttgttgtttctgtaggttttgtcccagcagtgccccggcttccttcagcactcccagagcaagccttcccataccccattggtagtactagcatgaagcaggcaagtaccctttcttcagagatctgattcccagctaccatttccatttattgagtcacatctaaaactgccaaatttgagtggagaccagagcaagcgaaggctctgcagcaagtccagactgtagtgtgagctacacttccccttgaagatcagcagctgttcctaagatcttaagtgtctgtggtatacagaggcaccacatggagtctctggcaagccctgataggaggattacaatgcagacctctaggggggtttgggagcaaatctatgtcttcaacatatttgcttctttttttgagaaacagttactggaatgcttttgatctttgtagagcctgaaagcttgaccaaggaacatcaaaataactgtgcaatctgaactgcccctcataaactgggtgttatatggtccaccaagccataagtttagcaagcaattaatcatcaagtggacatgcttttaagagatgtacatgagaaggtggttcaatgcctcaatttgtccttcaygtcctttgagacctactccatcttcattgtcttctctcactcaatccaagggaattccttataactgagaaagaaaaccttgaacttagtttacagatggttagatcccaagggaggaatgtacacatagacaccaaaaactccattaaactggaagttaaaactgtagcctggacacctggggctcatgccattgagccaacacttgaaggaggttgttgtatggagaagagcaattgatgttcattaccaaagggaacctgagcagcttccaaacagtgagggaggcagagagcacaatgactggattctctgagcacctattaacactttatgtccaggccaggcacagtgactcacacctgtaatcccagcactttgggaggccaaggtgagtgtatcacttgagctcaggagttcaagaccagtcttaacaacatggcgaaaccctgcttctaccaaaaacaaaacaacaacaacaacaaaaacacaaaacttagctgggcatagtggcatgcacctgtagtcccaactactcgaggctgaggtgagaggattgcttgagccctggaggtcgaggctgcagtgagccaagatcatgccactgcacttagaatactaagcaactacacaaaggcccattactgaggattcacatccttcagaaacaaaaattcagataagcccactagtacagaaatctagttagctgaggacaagggggacatggaatagacatgaaaagacaaaagttagaaacgttaaccatgctctcgtgattagtttcagaaatgaggacaagagcagtgatataagctttcttcctttcttgttacttataggtatattcatagtaatgcatattagctaatttatatttattttctttctctttttctctccttattttacatagagcttattggatcatggtgttttacacttcagactttatattaccaatttccaggtgggactgtgacagaatttgaggagcaatcaacatcagtcagaaattgataccgtgactctttctggaaattgttactatggttgggacttcatggctttctcttttagagagaggagagagcaaaggatggatagttccttcatctttctagacaatagcatagcttttgctttatggaaattcaaaaattcatagaaaggtgtatagatgtagaatggtcaaaggggtagactatgccagtttattaaactagcttttctcagttccaaactcttcattctatgctcagcggagactctgctatctacttttctcccttgccagattgtgtctttctaggttctgttagtagaatgcactggcgggagaacggaaggcagaagggaagaaagcagactccaccctacttgcttactgttccttcagcatttccctactcagatccttttccctagcagcagcaaaaacatcttaaaagacaacagagtaagacaagcagattcttcccctgagctgtgtggatctcagctcttgggaccccctcccagcatctgggctctgataacccatcccaacaccttcttgtttccctcagcctactggcaaagctacttcctgcagttaatttctctgttcccttcatgttccttttttactactttagctattcatcatactaacttctttctgttataattaktgtggtttctgatttcctgactgatatgagtacttattacaagggccagatactgtattttacatatattgttttacttaatcttcacaaaccctgtgaggtcttgtgtgtgtgtgtgtgtattccagtatattggatatataatattcaatcatatatatatatatatatatataaattcagtgtattgaggctgataaaattgaatttaaacttttttcttttaacatacccatcttcataaaggaatgttaaaacttggatttgaacacacattagattgacccaaaagcctaccaactaaataaacccaaaagcaaccaaataaacaaatgtggtatagccatacaaggaaatataattcagcaacaaaaaagtgaagaatttatacatgctaaaaaatggacgaatcttgaaattatcatgtggaagaaaccaaacacaaaaagtaacatgttgtatgatttcctttatatatgaaatgttccgaataggcaagtatacagacacagaaaattgattagtgtttgtcaggggcttaaagtgattaactccttagttttcactccaggaaaatggttattttacatttgttaaccagcttcaaatcaattcagagaatggtcctggagttttgtgagtaaaccactattttacgtatagtgcttgtattttcctcaaaaygctgccacacagagagcactgtaattttccatgctattgctatgttgatctcagaccttgaaaagtagctttgatccaggactgaaaagaagagaaagtggtgcatttcacgcaaaaggaattatggatggctaacaacattaataagatgctcaacttcactaacagaatgtaaacaaatgaatgtaacaatagaatatcaccacacacacactcagacaggcaaacatgagcatggtaacaagagaggaaggaaactctcatctatcactggtggaagtacaaacagatatagccttttagaaaaacattctggtgctatgtgttaaaattaataatccacatagcctcgtattcagtaaccccactcttagttttctataccataaaaataaaagtttcaatgcataaggatatagtgacaaagagatatttgacaattttggaaacaaaktaaaggtctacacaatgaggcataatttaatatactggggtaatttcatacattattacctagtcattaaaaagaatgacccagatctatatatatttccctggaaatatgttcttgataaacaccaaaggaaaaaagcaagtacggagaaataaatacaatattctatttatgtaaaacaaagtggcaaaatgtgtttcatatgtaccacgcatatttgtatgtatgtgtatatgaatctaaaataatggagaaagttacagaaacacatataccagatagttaacttttggttgcataatcggtgagtgggggaccaggtggggagggtaggatggagtacagggagaagatatgtcagttcacaaaaaacaactgtatttattaaatatgtgtcccagtatgtaagatatttytccatttatgctgttttatacataagtgtgatattacataaaaatacataaatgaatttaaccaaaatactacaaatcagtatatgtaagagtagcaggatttcgaaggacttttttcatccttccctataatttggtgtattctttgaagttttacaaagattatgcattgtttatawaatcatacaatcaatggagtgtgggcctccccctatgacttagtacccctgcattttttagctctcagacttgttcgcattgagactccaacaatttgttaattacaacttagattttcctagcctggaattgattcccatgcaggtttctggtacagtaagttgtaattctctatatctgcctgtctctaaaattttggagtagcagtttttcctatgacctcacctctctaatggatttggaagagttgatttttaagtttgtccagcttgttacttgttgttacaataaagtagtaacaacatgctactgctatgttgatctccgaccttgaaaagaaaagtagctttgatcctggactgaaaagaagaggaggtggtgcatttcacagaagaggaattatggatggctaacaacattaataagatgctcaacttcactaacagaatgtaaacaaatgaatgtaacaatagaatattaccacacacacactcagacaggcaaacatgagcatggtaagctccttgcatgctgaaccagaaaccagaagtctgagcaggtagattttccaatgggtttattattggcaatgaatatttaattgatcacattatattttcagctctatgaaaattagaaaataagagaagatacttactatatgaatatactataataaactgaaggttataaggcactttctctaaatcccataataaacatttgtctttttgtattattattttattttattctatttttgagatggaatcttgctctgtcacccaggctggagtggagtggtgccatctctgctcactccaacctccgcctcccaggttcaaacgattctcctgcctcagcctcctgagtagctgggactacaggtgcacgccaccactcctggctaatttttgtaattttagtagagacgggtttcaccatatttggtcaggctggtctcgaactcctgacctcaggtgatccacccaccttggcctcctaaagtgctgggattacaggcataagccaccgcacccagctggaattttatctttatgtggtatttagaacatatatttagaatacataaagcagtaagaagaacgtttatttttccttttgaaacacacaatttgctagatcctttagacytttaacaaaagtgatttaatttgacttgcaataagtttcagaatgcaatttatatacattattttgcttataacagaatatctaaaattgggtaatttataaagaaagggaatttctttcttatagaaaaaaaaagctttcctattcttaaattattgaatagttaacaatttgctcagggattgcatctggtgagaccattctttttagtggggacactgcagcaccctgaggtagttcagaacatcatgtggtgagggggctaagcatgccaacatgctagcacaggtctctcttcctgttcttataaagccaacagttaccctccgaggacaaaccattaatccattaactcattaatgcattaatccatgagtggattaatgcactcatgatccaatcacctcttaaaggtcccacctttcaatactgccacattggggattatgtttcaacatgagttttggagggaacattcaaaatagggcagagacttaatagaaacaatgtacaaccggccgggcgcggtggctcacgcctgtaatcccagcactttgggaggccgaggcaggcggatcacgaggtcaggagatcgagaccatcctggctaacacggtgaaaccccgtctctacaaaaaatacaaaaaattagccaggcgtggtggcgggcgcctgtagtcccagctactcgggaggctgaagcaggagaatggtgtgaacccgggaggcggagcttgcagtgagccaagatggcaccactgcactccagcctgggcgacaraaccagactctgtctcaaaaaaaaaaaaaaagaaagaaacaatgaacaagcttcaaaaacagatagataatgtaagcagaaagatgcaaattctaagaaagcatcaaaaagatatgccttagatcaagaacaatgaaacaaatgaattcctttgatgggcttattagtagattggacacagctgaagaaagaatcactgagcttctggatataacaatagaaacttccaaactgaaaagcaaacagaagaaagattgaaaaacacagaacagaatatcgaagaactgtgggacagttcagaaggtataacatatacataatggaaaaaaactgaaagaagaaaaaatatttgaaacaataatgactgaaaatttccccaaattaatctcagacaccaaaccaaaccaaagatctaggaaactcggggaataacgagcagaataaattcccaaaaccctacacctagatataccatattcaaacaacaaaatcaaaggcaagggaaaaatcttgaaagaagccagatggaaagaacaccttacctatagaggaacaaagagaattacatttgactaagtcaactctttaagcactggaaaggggctcagagctatttggacagggaattcaggcttctgctacccagatcgtggtctaggagggaaaaacattttccttagtcccaaggacaacttgccccttgacttactaatgcagggattccttctctctgggtgtagggacagggcttctattagattacctgccacaatcagacctcaacaaatcatgattgaatgaaccatgcaagcaagaagaaaatggagtaaaatattcaaagtgttgagagaaaataaatccaccaacttagaattatatacccttcaaaagtgaagcatatataattaacatatacccttgaagggtaaataattaatatatacccttgaaaggtaaataaataatccttcaaaagtgaaggagaggccaggcacggtggcccacccccataatcccagcactttgggaggctgaggtgggcagatcacctgaggtcaggagttcaagactagcctggccaacatggtgaaacccagtctctactaaaactacaaaaaaattagacgggcgtggtggtgggggtttgtaatcccagctattcaggaggctraggcaggagaatcgcttgaaaccgggaggcagaggttgcagtgagccaagatcacgccattgcactccagcctgggctacaagaatgaaactctgtcaaaaaaaaaaaaaaaaaaggaaggagaaataaaaagtttctcatacaaaaaaaaattgaggaaacttgttgccagtagacctgtcttataagaaatttaagagaagttcttctgagagaaggaaaacaatataggtcaaaaactcagatattcataaaaaatgaagaacatcagagcataattgaaagcaaaaaattttctattattaattgatcaaatagttaacagtttgctgaaaataataacggcagcaatatatttgattatatatgcatataaatgtatgtgtgtgtgtatatatatgttcttatgtataaatgaaatgaatgacagtaattatacaaggtacaggagtaaggaattaggaayatttcattattataaaatatttgcactacccatgaagcagtacagtgttatttgaaaatagatttagattggttgtaaatgtatagcaaccactaaaaaaggttaaaaaaagtataattaatatgataagaaaggagagaaacgaaatcatataaaagatttaactaaaaccacaaaaggtggaaaaggtgtggaagaccaaaatagaaacagaaaacaasggtaacagaatacagtaaaaaatatagtagatactaattcaactatatcactttaaatgtcaatcatctaaatataccagttaaaaaacagagattgtctgaatgaataaaaaaaaacaagacctaaatatatattatctacaaaaaaaaactactttaaatrtaaagacaaatatagattaaaagtaaagtaaatattaatggagaaaaatatatcatgctaacagtaatcaaaagaaagtgggagtggctacattattttcagacagatcacattttagagcaaaaaagttatcagaggtaaagagaggcattatataatggtaaaggaatcaaaactccaagagcacataatgattgttaatgcgtatgtacctaacagccawgtgtcmaaatatatgaggcaaaagctaatacaactttattgagaaatagatgaatcaactaatatgtttggagactttaacacccatctgtcagagctataagtcggatagatttagcaggcagaaaatcagtgaggatataattgaattcaacagcaccgtcaatcaactgaataaaaytgacatctaaagactacatctaacaatagcagaatacatattattctcaagctaacatggaacattcaccatgataggccacatttttgaccataaaacataactgaacaagtttaataaaactcccactcctttttacctaaatgaactgaaaacatgtctacacaatagctagaaagttccaaaatacttaaagattaagccatacctttcaaaataacacgtgtccaaaaataaatcccgagtaatttaacaatatttgaactaaaacaaattgaaaattcaacttatcaaaatatgtgaaaagcatttaagcagtgcttagagaaagatacatagattgaatgcatatattagaaaaaaagaaagatctaaaattgatcatctaaagtttcaccttagaaaactagaaaaacaaattaaacccaaagtagcagaagaaaaaaaaacaaattagagaaaaaagtaatgaaattgaaaacatgaaatcaatggagaaaatcaataaaaccaaaaattggttcttgccaggctagctaaaaaaaaaaaaaaaaaaaaaaaaaaaaaaaaagacagacattacttacatgaaaaattaaagatgggactcatatctgtaatcccagaactttgggaggctgaggtgggaggatcacttgagcccaagagttcaaaactagcctgggcaacatagcaagaccccatctctacaaatatatatttttaaataatcaaggatggtggtctatgcctgtggtcccagctactgaggaggctgaggcaggaggattgagcccaggaggttgaggctgcagtgagacatgattgtgccactgcgctccagcctgggtaacagagtgagttactgtctcaaaaaaacaaacaaataagtaaatatataaaattaaaattaaagatgggacatcaatgtagaacctatgaacattaaagaaaataaaggaatattatgaacagctctataccccaaaattctaccaatttcttgaaagacacaatgtgccaaaatgtacacaagaataaatagacaatatgaataggcttatatgtaataaagaaattgaatcaataattaataaccttctaaaacacaacaccctaagttggttccccagtgaattctgtcaaacatttaaggaagaaattgtatcaattttctacatctcttccagaagctagaagcagagagaatacttcatacctcatttaatgaggccagcattgtctcagtatcaaaaccagaaaaagacattataataatcaaaaacaaattttagaactagtgattatagcaaggttgcaggatatgaggttaatatgcaaaagtcaattgcattcttatatactagcgatgaacaagtggaatttcaaactaaaaacttgttagcatttacattagcactccataaaaaatggaatactttaaatgtaaacaaaatatgtacaagatctatatgaggaaaactgcacaacacttatgaaagataacaaaaagaattaaacaaatkmagagatatttcacttttatagctagaaagactcaatattwtcaagatataaattctcacaaattgatttatagagtgaataaaattacaaacaaaattccagcaagttatcttgtggattttgacaaactgtttctaatgtttacatggaggggcagaagacccagaagagccaattttatgttgaagaagagaaacaaaatgggarggcctgcactactagacttcaagactacagtaaagcttcagtaatcaagacagtatggcactggcaaaacgatagataaatacattaatggaacacaatagagagcccagaaatagacccacatacatagagtcaactaatccttgacaaaggaacaaaggcaatacaaggaagcaaagatagtcttttcaacaaacagtgctgggacaaatggaagtccgcatgccaaaaaataagtctaggtatatgccttacagccttcacaaaaaaatagctcaatgtggaccacagatctaaatgtaagaaggcaaaactgtaaaactcctagaaggtaacataggagaaaacctagatgatcttgggtataacactgactttttagatacacccttaaaggcatgacccatgaaataaataaataataagctgaactttattaaaattaaaaacttctggtctgcaaaagaaaatgtttttaacaatgaaatggcaagccacagactgaagaaaatatttgcaaaagatacatctgatgaaggattattatccaaaatataccaaaaaacttttaaaactcaacaataagacaacagacaagttgattaaaatctggacagaagtcctgaacagacaactcaccaaataaaatttacagatggtaataaacagaggaaaaagtgttcaacattctatgtcagtaggaaattgagaattaaaacaacaatgagatacaacgacatacctattagaatgtccaaaattcaaaacactgataataccaaatgctggcaaaggtgtggaagaagaagggctcttgtttattgctagtgggaatgcgacatggtaccgacactttggaagatagtttagcaattgcttataaaacatacttttaccatacgatccagtaatcacactccttggtatttacccaaaagaattgaaaacaagttcacacaaaaatctgcatatggatgtttacagcagatttacttataattgccaacacctggaagcaaccaagatgttctttggtaggtaaatagtacatgtggtacattcggacaatggaatattactcagtgctgaaaagaaatgagttatcaagccataaaaagacatagagaaagcttaaatgcatatcattaagtgaaaaatatcagtctgaaaacgctacatactgtatgactacaactacagggaagtctggaaaaggctaaattttgcggtaaaatgattagtggttgccagggtttgcaggaggagagaagaatagtcacagcacagaggacttttagggcagtgaaactgttctgtatgatagtgcaatgatggagccatgtcattatacatttgcccaaacccgcagaatgcagaacaccaagagcgaaccctagtgtgaactacggacttggggtgataatgatgtgtcagtgcaggttcatcaattgtaaccaatgcaccyttctggtgtgggaagtcaaatagctggcagttgtgcctctgtggagaaagagggtgtatgggagttctctacactttccactcaattttgctatgatgttaaaatttattgtatatccttaattaagaacctattattcccccaaattttgctagatgttgaaaattcgaggatgagcaagatatcgtttgtatttccctagatcttggattcatttggaacaatattcacgtaaacaaagaactgtaaaaaaagtgatgaaattgccacaatgcaggtatataaaaatgttcacctcgtttatrcattctcatttttcaattatacttaatataaaaaatatttaaatgttttcatgcatttgtatgccttcagtcatcaagtaaaatgtattttaatgttactactgatattttttctaagaaaggtagcttataaaaatgacaagttaaatgaatttttagttcacttctaaatattaktattttaaaatgaagaataacttgtagaattatatgtatatgttatatttaataatataaagaatcatctatatattatatttaataatatgcttaataataaattatatttaagaatataattatacatacctaattacattttatatttctattggaaaagctttttaaaaaatgctttgtggaattttcccctctcttctcactcttacaccttcccttcctcagtgtcaaagcaagtaaagtcttacatttttaaaaatagaaataataacaataacaaaaaaggaaaggaaagaaagtcagaaacacaacattaacagaatgcatatttaaccaagtctgggagatcaagccagacagcacttggtaaatactctttggagacagtaatgctcaaaggttgtgtttgctgttgtgcttgacgtttgttttgcgtgtgatctaagacaccagatgaccagtaatctcacttgccctttctttttctactctctgtgggctctgcatacacctccttcccctgcaaccttgcctgcccctggccatcgcccagctcactgttcttccaaagatgtctgggatggttaggattcagcaggtcacaccttagcctgtcaggacctggcgcctcccgtgcccagcattagtccatcgcttcatttcacctccaaagagcccagcgacaagtctgccttgttagacacagatctcagtgagcccaaggcagccagcagtttcccgtttggtttcctgtcatatctccttatgttttggcagtctgagatatccacagttcctattaacctcagcaagggccatgccaaggaggatgaattgctggggtagacgacttcactcaagggctgtaacattcagtctgcacaaggtcagcatttacaaactgagtatggttgggttttagtttggtttatttcaaatccccagccttttactaaagttatgcaagttaagggaacctgtccatggcacttcggtttacaaggtttaatttaacttatcacacattatcagttttgagcttcacaacaatcctgaaagatagatgggtaaatatttcccacattccattggatttcattcatttgttatccattcattcatttaacaaacttctttgagaatctgctctgtatctagcactgcacttggagtggaactacagactataacatgttcttactctctatggactgctagtcttacaagagaagcaaagaattgggtaaattctgcacaaaatgctattacagatataagcaaaaagcagagaagagtgtacccagtaaagtgggtaagatagatgctcagaggaggtgatgctgagttggaatctgaagaaataagactttgccaggaaaacaaatacaagaccctaacatattgtgcccctatttagtactcccatgaaccctaaaacattctaattcatatgactgcctcttttcagattcagtctaggtttaaggcagttataagaatgaggcagtcaattagcaaataactggcacaaatgagacaaaaactcattccatatgacttagtgtgttttcatgaatcaagagtattttcctaggaggagctaattctgtttcaaagaaagcattgaaggtagagaagagataaattataaacagataatttcaacctaattatctcccagataacaaaaatggacaagatttcccactcatattttaaataaggcttattatatggtgaaggttttgagttttatgaagcacaggcttcacattttttgccaaataaaaatggtgctcgatttatagttaaatttcatcccgaagaatttttttttcaggaagcattaaagaaattctacccagccagagtactttttaaagtcattttattgaataatgagaggaagtgaaacatataaaagaatgtcaatgctttcctcttgtagtctttcctggaaaaacagttgaaaaaactttacgaaagatcactaagaaagattactcattggaaaaccatggtctgtctcaatagatcatgccaggtctatcaagatttgctgtgtggctctggacacttcactttaccagagtgagtccttctgtcttctcttgtatgtcataggtactggtcacaattgtattccaatttacagtgtttcagtcactaaattaaatgatgtatgggatataatttgaaacacaaaatactatgcataatgaagtactaaaaagaagaatgtttgcatttattattatacattaaatatgttgtggaattaatgaagaatgatgcgtttattagtagacatttgagggaaagatttgatgtagacatctcaataaaacttaatgttttcttatgggtagattataataactcctgttacgttacctgcaattcattttaaatacttcatcatagattgtatgatacaggcataccctggagatactgtgggtttggttccagatcaccacaataaagtgagtcacgcaaattttttattttctagtgcatataaaagttatgtttaccctttacggtagtctattaagtgtgggctagcattatgtctaccaaagaattatacataccttaattaaaaatgctttattacttaaaaaaaaaaacaactcttttcaatgaaaaaagttaggacttttctctgcattgggctttggtttaagggaacattgtggccagtttgatcttctttccaaaacactaaaactttctccatatcagcaataggctgtttgctttcttatcattcatgtgttcactggagtagcactttcaatttccttcaaggacattttctttgcattcacagcttggctaactgtttggcccaagaggcctagccgttggcctatcttgacttctgacacaccttcctcactaagcttaatcattctagcttctcatttaaagtgagaaatgtgcaacacttagtttcacttgaacacttaaagcccattgtaggtttatacattgacctaatttcaatattgtcgtgtctcagagaatagggaagcttgaggagaaggagagagatgggggaatggctatttggtggagcagaacacacacaacatttatcaattaagttcacccagttacactggcatggctcatagcactccaaaataattacagtagaaacatcaaagatcactgatcacagatcttcataacagctatgaaataataaaaaagtttgaaatattgcaagaattaccaaaatgtgacatggagacatgaagtgagcacatgctgttcgaaaagtggtgcccatagacttgcttgaggcgaagttgtcacaaaccttcaatttgtaaaaaatgcagtatctgtgacatacaatgaagtgaagtgcaataaaacaaaatatgccatagatgagtgaataagttaactgtactctacttgctagagtgaattgttaacattcgaaatattataattagagatctactctccaggaatggttagagcatttgaaagatcgtggccgggcgctgtggctcacggctgtaatcccagcactttgggaggctgagacgggcagatcacgaggtcaggagttcgaaaccagcctggccaacacagtgaaaccctgtctctaccaaaaaatacaaaaattagccgggtctggtggcacgcccctctagtcccagctactcaggaggctgaggcaggagaatcacttgaacccgggaggcagaggttgcagtgagccgagacggcagcattgcactccagcctgggggacagagcaagactgtctcaaaaacaaacaaacaaacaaamaaaaatgaaagaaagatcacagtcattatttcataacttaggttattccaagtgcaatgacttcacatcacaatgactccaatatcactacctccatctgcatttgaacagaagagctctttgaaacacatttttccattttgagaacctgaggagccagggtcctaacatccttaaaagctgtgtcctagtcttaggactcctgttcttgtctgtgggccactgttgtaataaaggattcacctaattacacctagatgactagcaaatttttcctcaagactattgtcacttggcttccagagaatattttgtgcaaagtactggtcagtgcttgaagggcagagagatggaatttcacttactttaaagaactgattatttgaatgtttttgtacctacttgacaataaatctgtcgtatgctggattttgtcagaaactggctttcctgtaacatcccacctggtatgttagagagagagaaaatagagcttatagctacttctaatgtggggaaagagggagagaagcgagggtactagaaaatcaactgaaagagcctaaaaatggtgaatggaaaaactgcctaaatgcactttaccaaaattatctttttagtattattgggaatatcaatccaaatttttcttacaaatgtgccrarcatctactatgaactgcaggtgttgaagaaatgattagtgtcctacatatgagttcctatttgaaagacttcaaatatttcttgaaagcattgaggaattaatgagattccacttttataaatcttgagtcgtgtagcctaccttatctccttttttactttggcttccagaaaattctgtgttacatttgatgttcaattatgtgtcccctaatatcatccaaacagctttcattttcgttttcttcccttatgtggcctttatttttaattctgataatattgctctatattttatataatacttaatttgtatttaagtttggctgccttatatcctttgtagaaccacaaggattcaaaatacaaacatatacttacaaataaacttatatataaagtggatttcaaacaagactgctatagaattctgtaacactaagtaagattacctcttctctaccagtttattttcatagtaaataattgaaaattcagagaaatgagtgaacattagaagcagcagtataaaagttgagcactcattgtaaaagaaatacattttaatgagttgtaaatcatgggaaaatagaaagtgtgaacatttcaaataagaaatttccttaatgcacatttataattaaaggtttcctcaaacaataaaattaaaagttctcattatacttttacataatgtcttttaaaatatattgtaatactttagttttttctaaattttctatacttggaaaaaacttgctgagcacagatttttatatcaataagttatttttctattcctgccacctctactcctcccatctccaagctaatgataaatagagaattaaatgtaagaaaagtcttaatgtcrttatgaaacttgggctgctcttctgtaggtgctgaaattcttccttctagaaagtcaggaacatttattcagatgggctacagccattgattggttagtcttgctttcaacatttatgaagctgtggcccaatttgtccttttaacatttatttcctttgtacccaacatctttgaggtttcaaattaggtttaatttcttaatcttcatgttgtagtacttatcatctctctcattagtctaatttgagttaattagaatctgtggttagttctcaatctgtgttacagtagaacaattgaaaagagaagcacagacacaattatgccattgtattgtctggaggagacagaaagccagtggggcttcccttattaggttaacatctacctgacttcaaaatggttcaatgatataaatagcaatgggagccattgggaattccaaattccacccctttttcctttacccgcccttacaatccgattaattcaaaggtgatggaggaagagaaatgttctacatgtcaaaatgacaatgtccattatatgatttaccgaatgagtagtgtgtgtgatagttgtgtgtgaattcacatttttacatttaaaataaatttccattttgtcatgttttattaaaattccccttcaaatcaatgtggatgaagtatacgcctgaataatctcttttgatgaccacgagggtttgataaacatgagaatgaaataaacataaaatattagtggttacattatattgaaaacctggcagctgtggtgtgatttgacaccccgaaaggaaacttcgcttaggagtatagatttgggagaccaacttttgttataaaggtaaaacattcttcaaaatctatgtgatgtaggccaggtgtgaatttcagtgtacaaatatatctataaaaaacccaaaagaggcataatatttgatataattaaatatacttgccatttaccgcattcaagtaactataagcttccaattcagtggtttaaaattagtaactattaagagtataatcaatgagtcatcaatgtttagaaaatacagattttattttttttaaatatataggtaccaacaatactcattgtatagggagaaagatcttaaaactcattccttaagaaaattctaattgaaaatcactaggagccattagaacatgaataaatgtaaaacaaataaaaaacagattttaaggtaccaagatcaggtggtaggaaataaaataaatgtcagctacttaagaaatctacattgaataagaaactactaatactcttccaaaagggatattaaggaattatcctaaagatattctcttcagagccctctagattcataaaagcaccagccaagttgtttcccttatctttaaataaaatatatagcatgaaaacattgtttatttttaacaatgttaaaaataaataggttttaattgactataatgcaaagttgtttcttaaaggtagctgttattttcaggaacattttcaagggagaacacttttattcatggattcatgtagataagttgtatagaagtaataattataaaaatatgttaaattttgggagatagtatatatactctttgggtctcttaaaacacataaattaaataataaaatatgattatatgcttttattggaaaccaaaactcaatgagacatatggttgggtctgttcttagcctataaatgttatattcaattttagttgcaatgtttatgtctatgagactgcttcacaagctataggagctataattttatttgcaaagggcaaatgtgattattctgaattctataccaatccaaagagacattttaattccagtttcttggctgtaaaatgaggataatacctgcttaacatctccttgtattactatgagaacattgataaaatgtatgtgatagttgggggaatagtaaaacctttggcaaatgtaaggtggccccagaattttcactgcatattacttacagtaatacactccacctggatgatttgggcagaaagaaatcatctgagaatgttttttataatattgcatgttgcgatattgcatgttgatgaaaacatgcagagttagctagcctgtatgctgtctttctgccaatttggagagaagctccttacaccagacaaatgcaggtttttgccagggccaaggtttcatgagcatactacaagctgggtcttttagtcagcagtcctgtgtcataaataacctttcatactgtacactgtgaccctgcaaagatgcttggatattataaactcaggtttttactaaaaaacaaaaaactaacctaatatggggctctgaacactttactagcaattgaaatggtcccacaagttaaggagaaatctttgccctgtgtgattagatcagctgtgactattatgaaattctgatctttagtcagttttaatagatatgctcaaaaatacatgtaatgataattggccacagattttataaactgcaaagactggtgaattttaatttctatctacaatgtagatcaatgttgtccagttgaaaatagaatataatccatctatgtaatttaaatttttctaggagccattttttaaaaaaattaaaataggtgaattttaaggaatttcaataatatattttatttaatcccacatatccaaaatattattaatccaactcataaacaatattaaaaaccgatacctgtttccctttctttgtttttcataattgtgtcttacacttaaagcaaatttcaatccaaaggctaaattttcatcagatgtattttatctgtrtttacattttataaaatttatgattgagaaacttattccaggtatatttaacttttttcttttcttgggamaggatctcactctgtcacccaggctggagtgcagtggcgcgatcacggctcaccgcagccttgctctcccaggtcaagtgattctcccatctcagcctcctgagcagctgggactacaggcatgcacaactacacccggctaatttttgtatttttttgtagagatgaggtttctccctgttgctcaggctggtctcaaactcctgggctcaagggatctgcccacctcggcctccaaaggtgttgggactacaggtatcagccactgtgcccagccttaacattttttttgaagtaaaatttaaaaatcagttcttcagtcatactttccatgtttcatgtgctcagcacttacatggggcccatgactactgtgtaggatggtgcagttagtttatatagctactataaaatttttcaaatattaatttagtaatcatcagatatgcttttagattttctaaagatatggtatctgactatatggcaaacaatttttaagtgatattcacataaagaagttattaatcaaatttcagctacttgagagactgacgcaggaggattgtttcaggccaggagttctaagcctgagcaacatagcaagactctctttatgtttaaaaaaattaagttattaatcaaatacaaaaaaagtaataatttcaataaaatatatgaggtttatataaaagattttgtagagtaataaaagtcaatcttattaaaatattagtttccctgtatttgcgtattaactttgcaactgtcatctttttgtcaaaaagtgacttttataacagttacattcataattgtctgtttaaaatatgaataactcagatgttgcctcagtaacaaaaaagtattttcaaatcttctaacatgatcaaactttgtctgtttttactttcaagaaaaaagtgaaaaactcagcttatttctttgttaataagagtggttttttgatgtagaggaaagagacaagaaaagtttgatgctctatatatgtttttaaagttgcaacttgaaaaataaaattatgaacacaatttagaatattcattcttcaccactcactctgctagcccctgacacaatagaggaattgcaaaagtataccaaactttttaaaaaaatatcaatgtttattacaaattatattatacaatttttctacttttatattccttctatatgttctgaagactgttcaccttgtagagacaagatgtattatttttatggaagaaaaagtcttgaaaatttattctattattatactattattgtcaccattatgtgagaagcaaaatcaaatataataatctttcctctccaagtaaatggatatatattattaaaattcttgatgtacttttacttaattgaacttaaatttttaaacataaagtttgcattaatttaatatgtaaaaatatctgtcaaatctgtgtacctatttcagaaattaaatattttcattatttataattttatttattcaaattatttatacctttaaaatatatatcttaaacactaacttccttttgtctgacacattgatgaggtgaaaaagaccaaatttttataacagaaaatcatgtaaaattgttttccttacaaattatgttgttttataagtatgtactgaaaagatcatactataagcttttcttgtctagtgctttatataaatttttctacccaaggccagtcagtaaaaaagtgtctaaagtactgaaggccaattaattattttaaaattgcaagtctttctcttactgaatcttttgagtttgcaaaatctgtacagacaactatacagacaacttcgtgtctggacttgagttggtatgaacttgaatgacttttatgggtaaattacacaaaccggttctaggttatcaaagtgttctctttctcattgaaaattacacagagagttcatgcaatttcctccagaggaagcagatgtcttgttatgtttctgtttatgacgtccaccgaatagggtggcattgtaatacttatttcagtaatgtaattcatggcactataaatatgytgaaccgtctggtaattccatgaggagtcagtgaatttcagtgacaaaggagaattctatgcagaaaatgatgtgcaaataagaaaagcatgcagcctcatctttgaagagacaatagcttttataagacaaatccaggccaggcgccatggctcatgcctgtaatcccagcactttgagaggccaaggcaagtggatcacttgaggtcaggagtttgagaccaggctggccaacatggcgaaacctcatctctcctaaaaatacaaaaattagctgggcatggtggtatatgcttgtaatcctagctacttgggaggctgaggcaggagaatcgcttgaacccagtaggcggagtttgcagtgagaygagatggcaccactgcaatccagcctgggcgtcagagagagactctgtttaaaaaaaaaaaaaaatcccattgcagacaatttttatactagcattttattgtgtttaatgctccttgtaataagtaatacacctgttaaagtgtagaaaaaacattgtttcacagacatttatttaattataataataacagagggatttacactccagaatataaaaagggagctccatcttgatatcacttacaagcttatgaaccaactaaatcttttcttattgtggtgttcctactagaaaatatgttttttataaatttataatgccatatttagccacataaaagtgaatatgtatttatatgtatcatgaagaacatgtctactcttgtttaaatttaaacatagtctagttaaaacacagtaattcttcacattctgtttaaaaaatgcatccaaccttgttgttcttctttaaatacaaagctgatgagagttgtcactttgtatgtatggaaagaccttttattccccccagcaggataactgtttgttggctttgcccctttacattcatgtatcattttggatttttaagctcccggatataagtatgggcaaggacagagctagcaaatgtacttagaatgttctgacacattcttcactcttctctagtctactctgggtttttgaacatggttgcaattcatttcccatctttttttttttttgctaaaataaactgagaatattgggagttagatccaaagtttcttgctccctcctttcctgactccattcccatgaaagcacgctactcccacattgtcatcgaaagaccactctacattgctacatctgtgacccctctgctgccctcttgtaaagaagagcaggttgtgagatgtgtttattgccctggttttcaaaatatgtcccatagcagaagcattagtaattatttgggaatttattaggaaatccaaattcttggacgccactccaatcttctaaattagaaactctggggatgggagacatcaattcgtattttaacaagttctccaggtgattacgagtttgagaaccactgacatagtgaaaggcaaaacagaattgcccaaagtcctatagtcaaaggtagaatcagcctagaatgcatgtgcctagactcagcttagctctaatcacccaagaccctacatttgtgtgatcatcaagctcctcttacacctgtattaaagggtatttgggtaatacttgaaacagaacttctccaggactttattaacttgaagaaattaatgacagcatagtcatattttaataatgcaaaaaatgagaatatgaggaatgaataattttcattaaatattttttgcctttaaggattatatagaaattattggccctctgattgtaggatcctacaaatgggtatatctgaatgccaaagagtgatcaacaaattctttgtgaagttagctttagcgcttctgtttgagaagtaaaatgtctcttgtaggacattggtgaactaaaccacactgatgtactcaaataccattcttacttcccttcatcttgttatcaaaaaatgtatctaaagtacacctgtgaaatggcactcagttcttttggcactttcagatatttgaatgcattagtgctctgtttttattagcctgtaaatttgtgcaaacataaacgtactatgaacaccatcataattgttttattgtttgcagccaagatttactgtgtatccctttactcagagcgctacttctttctgcttacttctggtaatttctatgtcttttcattgatacattttttttaaagttaacatggtggcctgtcttatctttaaaaatatgtagagatctaataagcaccatcatttcagaaaaaaaaaaattgaaccatctttcctctcaaagccagtatttcacaagtgatcacagtgatagtttggcatgagtataaagttttcaaagggggctgacactggaaccattttattgaaataggtaagttttaaataccctaaatgagaatgcatgtctaaaagcacaagttgttgaaaggagacaagttatcaagggtgattatgcttagcaggcttgatttctctatacctcaggtatcccctcccctggctcccactgtctctagggagacattgtgttaagtacaatgaaattatcatcacttggggtcttgcactgccagacatagtccaggtgaaacatctgtgtgatgcagccaagtatatggcttagtgtactcatgatgggattccttttgctctgtaaaatgataggcacaggcagaaggattatgtaaattataaagggaattaaatgcaatgcagagggtgtaactctatgctgggctgccaagcaggagacggcatgtacctggcaccgtgctgaacaaagatgcctaaaaatggaagcacagttactttttataggcatgctcctcccaggcacttactctacgtagttatattaaacaatctcctcacaattccaatgttactgacagagagtctctaaataattccatattttgctgcccacagctctcttggaacaaaccttaggctttggaatcatggtgattaacaatttagtgtacttcatcttcagaacaatttttgtaaaaatctgttatgaacctggtacacaaagaaaatgttttcctgcatctcccccaggaccatgatatgtgttactcttatatttgataattatgtattgaacagacttactttaagtcatgtgctatattagtttctggggatacagtgctagcaagacacagtcctgtaatagctgagtgcatatgacagattcatagacaccatagtctgataagttccatgactggaagtcgttagatgctttggatcaagcatctattagatcacatgaaggaaggacactgaccccactcctaaggggccagggaagggtttcctagaataaggtatcatggttgagacctgaaatagtaattaaccaaatgaagagagagagagaggaaagatggccaagaagaaaaaaagacagagagagaggaaaagatagagatagagaaaatatcatattctaattcccataagccaaagagggagttctattcagggtggtaaagtaacatgaggaagctcaatttatgggcaaggaagtagagaggtgaggctgttagaggtggtaagctaggactacaacatgaaggaaatttaacatggcacactaaggagtttgaattttatcagctagagtacaacagggagccactgaacaggcttgtgcattagcagtgacatgacgactagatttgtgtttcacaaggaatggtctgcctctgtggagaaaacattagaagggccaagattggcagaatatttaggaatctattcaacattttctttcccttatatgtaaagcacaatgccaggaatgtttcagatgctcaataaatatcagatgaagtattatctaaaataatttcctcttgtactatacagtctagtataagtgtagaaaaaccatgaatccttctagtaaatttctattacacatcgttagctttctccaaaggctacagagctttctttagggaactcaaatcattaacgatgacatcctatcaccaagcattcaggcgggtgaggggatggtttaaagagtaacttttctcttatctatgaactttaccatcaaactaatttaaccccggttgtaatagaatgacttagcactttggatatggcctttttaaatgatatataggcaaaagttttcaccattaaacaattatttcttgttatgatgtaactacatttatgtagtcagttctcctctccacttctctcaaaatgcagtgtcatcagtgtgatgcctaactgcaaaaatatttatctatagatttactgcccacatrtccaacatgtaaaaatcaagaggctatctgaatcttgacttgaaacagattgctgcagggaaagctgaaagctgttcaaccgcaattgcttttaacagtgcaagttgatgattaacaactttatctgcagcctgatgtggggatgaggatattttttctatttatattatatttaatagagaaaacttaagtcagctgttccttaaatatttacatgcaaaatagtttaattttaaggtaggaaaacttcatgttattgttgaatttgttctgtctagatacataatttgaatcagattattatcttccatggcaaataagtaccttaatgagcagcctgagagaatgtgcacatggaatcatgtagcacagagcttgaaaggcaggcccatctgctctaaagcactgtgttccagttaggaacacagaggtcttcagagcctggcacttctctttgtccaggcctacattgttgactttcagatggctggaactgagacactgactcttgactggaatcaggatcctttccacttgatccagtattttaatttttttgtgagaattttccaaattggagctgttaatagattgtgaaaaatcatttaaaaggatgatctttgtattttggcacctatttttatacttatctcaatgattggtctctacgggggatattttagttagttattccgctttttgcttcccattgccagtatttagcttaaatttcatgaatgcaggcaaaytttatacatagcgttgtattccttagtaggtacataaaatcaaataaactcttttggaacagttttgaggataattcttaataattgactaacatttccaggcacattatctgatttctggtaactcctgtgatgtattcatcaaaagttgtctgttaagccattttgtaaccacagaagacatctaaattagatttatttttttctttcaaagcatttttttaacagactggcttgatttacaataggcttacgaaaaatagtttatgtttcacagtctcctaaaacatagagcaaactgtagatttttcaaataccacagaggagcctaggaagatgatttacaaaggtatgtcctctatgccatcatcatgaagcaggtgggggtaaagaattgaagagagtttgagattccgaacttgggactactcctaagaaactttaatcccgataagaattctctgcattgagtgctctcactgtaagatttgtggacccaacggatcattgtccaactttggctatgatggccagatttgaaaagatayctgggcagatgtcctgctgataacgaagcctagattcctccttagaactgtgttcctttgaatgagtcatgctgcctcactttcaaaaatctgcttaggttccctatccccatgacacagatatttctcagaaatagtacattcaggaactttcatcatttccagcaaatattgaggtaatgtacaatgtgatatgatatttgtatgtcatattttatataggatatacttatattacatatggtcacataagcgtcattttttttaaagttcatgaataatactgactccttctacatgcagtacacactaacatattccactgcattttatttttgtaaatgctggtctcaacttactgaattgatattacattttagtttgacaattaatttgactgattttctgatttgtcagttgaaaaatactgtttaagccatattaaaaaawawatatatatatatatttatgccatttaaaaaatagttgtaagccttgtcaagaattttatgctttagcctacaagtaagagtaaatttttgaagagttttaagcaaaggaatggagtgatcctttcggtattttgaaagactattctgcctgcaccatagggcatgggttggtggagatggagacgttctgggtgtcatctgtctgttcaacagcctggagcctccttgagcagcagaataggatccgcctctcctcactatggctttgcctgcttgtccaggaggcaactgaagggcgagggttttaagatggtgatctccatttctccagaggccagatctaggaaacaagaaagcaaagcaagggggttaaaaattagtccagtcttttggggcagcggtttagaaacttaaagaacctacttgcacactagccatgtgtactctgttatccaaattactcacatattttagtcactggagtattcattaattcaakatataaaacagttgttgtgtgtcaaaatttgtcctaagtgtcagagatttagagaaataaggctaattcctggccctgaaggagatctacacaactttcactaaaagaaagtccatcatgtattttccgcatttatttcctttttgttccttgtatataaaagtctctgaaaatctagcctggcttagttgtactgaaaggaatgcctaaagttaggaaaaaaataacataaaatgtagaaagaactttctcgcctaccaccagcacccatgggaaagtggaaactcgagagaacaagtttggagtcgcttngttcaaaatggacgtccccgtggggaactctgcttccagtgataaatctttcgcggttctggattttgtttgagagagtcagcatttccttaatccttcagcatagtctttttataagtcttttcaaaacatgttaggttaactattaagaaaatcagttgtttatcatgaaaagcccaaagatgaatgaaagacactctccattgttcataaacacatctcccttaatgtagttaagctatcagcgagtaatgctggcaacagctgaaaagggtttacaaaatactaagggacgtgagataaagatctgagcagtaacatagaacagaggtagggttattcaaagcacactttcccccaaagcccagcatacacaataactccctctgtgagtagcaggcttcggtagaagatcaaagaactaacacttgagactatatcaagaaatctactcgttaaagagccaaaaatgtagatcagaatcttctttcagattaactcaggatacgaagcagaataaaatggacaaaatatctttccagtgaagtgaaaaagaaaaaaaaaaaagaaaacaataatctacagttcaaagtggaccactgaaatgtggggccctaaagtgttgtgtctatttggatacctgtagacaattttatcactgcccccaccaccactaaattgccaactatttgtctcacatttctgaaaattatgaaaccactatagaaaatgtaaaacgctaaatgagaaacaaggcattttggaaaactgctcaataattacggtaaattatcactgcagggggactggattcattggcaaatcattaacaggctcccacttggcctaaataattggtatccagtattttataggtagtttgtaatacctaatgaatatttctttattactcctctaacttgaaaaatgaaacagtgaaactagatgatctctaaggcagttcctagtcttaagtccttataccctaataccctggggtaagataaacctacttgtctagaatatatattatttattaatgtgtgtgtatatgtaaaagaatgattctgttaataaagagcacacctgaactgtgacatctctgatagatggcaccactaggtgcatctcatagggttctgaatgttactttataatttaatatattaaataaatttaatatattaaatattaatttaatatattaatgatgatattttaatatattaaataaaaatcactaatgggcatatgacttcatacagcatcttttgacaaagaccatgtcttgcatctgaggaaagtgcacttttctttggatttaatctatatattagagtttgacctttcatttcttgcacagtgagtcagcattatttgctgataaagataataaactaattttcatatcactgttatataacccacaaaaagaaaatctacacctttatcttttccmatggcatttgcataactttgcacctcattacaacacaaaaggcccttatgtatggtcttttgcaacagggcatactccttgtgtatacacctgaagtcttgtttatatttggtgtggtggtacccataagagcatttttgtggtcggtgttgctgtttgcaccacagttctacttctagcttgacttacagatatcagaacctagtaaacacaagtgaatttgatgtgactacattgttttatatgtgaatagtgtctcccacaattctgtgattcttgtgccctggtcttagtgaaaataatcatttctttggtaaggacttgagggagtcagtagaaaagaaagcagtaatctacagttgctctgagaaagaggctacacagtaaaaagtttcagggcgtgcttgatcataatagttcaagtcttgctaaaatggttgtcttctgttctttaataaccattttgtggatattcatgagatggaaacatacaagaaattaaaatttattcaaacatatatttcatgaacacatactatgccctggcttatctaaaatgtgtgaggcttaaagcaactgttcacrtataagtagttagaaatgcagagtactggttgggagccaggggattcaagtcccagaaggaaatacttttaatatactgcattattcaggcctttaatctcttggattgttatataatgtttcactccactatytggaaatgcttccaaaccgcagaatgtcttcagcattgcaaataaattactgtgccaacatgtttctgccaccctgttgagccacattattagatgaggtccctcagcacaaattactttttgagcaactagattcatttggttggaaacatcaggccttcaataaccttttaacacaaaaatctaggatcttatttcatgtatgcattcagttaatcaacatgtatttgttcaggcattagctaggagttacagtacagtgtttggcagagaaagtagacaaaatgatttctgccttaaatctaggagagaaaagatatataatcataattataaaacagtatgattaagattataagcaagagtgtcagaaagtagagctgaggatggagaaagagaaccctgatggcatcatctgatcccctgtatccagttatatttgcagccaactctcttactacaattctttggttcgataagttctgttggtttaattttgttttgttagcattgtttgagtttctgtacttgtagtttaaaatgttctcactaatatcaaaagcaaaagtcaggaaaaacggaagcagagagctgtactgaggaattaaaataatccagatgagtgataacaatataactaaagaaaagcggatatatccaaaatgtgtgaatcctgaatgagcaagactcactagctgtgtgagggtggggagagggagaatgaggggctatgatgttatctgtaaaacacttttcatcatgaaacctagacaggtgaaagggtacattcttagctaaaatgagtgaaagaagcatgagatcttttagttcttcttagggttcagtccaaggaaatctttgtggtttattkcacgctggtgaatagccaatgtgaagaagtaaaggttgtgtgtgcatctcctcccagatactacaggagtcacattctaagcttggtgtaattaactaacatagcacttgatgttccttcacctaaaagctgagcactgtcagatgtgaagtaccagctaagctgggtgcccacaaagggatgaggatgactcactgtgctctgcttccatgcctgccactgctgtgaatgggataaaacttaaaccctcatctttgaagccagtctttgcgggtaactccaagcagagcagtaattcaatctccagttcccagaggtgtaagtgacagtggtttcagagagatgatgccatgtctgtgccaaaatgcagctgaaaaaagcatccattgccactattcaaaaattcaagattaatcttgagtgatgtgttccttatgatgaaatgaaaaaaaaaaaaaagaaaagctaggtaggagcttaaaataaatttggtccttaaaaaatcgaattatatattatctaatataaacctataacctatagagagctcattcaaatctgcatgtgaatattaagacttcagtataacgagaatgagcgggaggcccactcatgaagagacaggcacaataaagagactcgtggaaacttgcttagctttatacgcaatgaaataaatttaaattaaaattcagctaatgtatcatttcattactaataacttggaatcagggactttttaaaatattaaagtgaaatcatcatttggaatggagtatggcaatatttaatttataatattcaaaaccataaaatatctttaatcttgcccaatatttctatccctacgattataacctaaggatattactcagcagaggaaaaagatatacgcatgaaataatcatttagcattctccataatatcaaatatattgagaaaagcttaactgaccaagagtaagcaaatgaataaaacacatgttgtaaaaatgtatgtaggcataaatattatagttataaaacagtgtggaaatatggaaagtggttttgtaacttttgaaataaacagtatacaaaattgtatgcatattatgtaaactaaatatatatatttgggcaaagattgagttcaaacaaataaagaaaacagaaacaaagtaatatatgtattaaaaattaatttatgacagaatgaaagagggacagaagaggaaccatttaataaattgtgttaggacaacataaagacaaaatckattccgggcaaataaaaaactcatagggaaaagaagaaactgataaatatttatttatttatttaattatattttaagttctgggatacatgtgcagaacgtgcaggtttgttacataggtatacatgtgccatggtggtttgctgcacccatcaacccatcatttccattatgtatttctcctaatactctcccttccctagcccccaaccgcctgacaggctccgatgtatgttgttcccctccctgtgtccatgtgttctcattattcaactcccaattatgagtgagaacatgcggtgtttggttttctgttcttgtgttagtgttataatccctgtagtatggggatatccactcacagactaggtgtatttgtcaggacaagactaagctactgtaaatgatgtccaaaatccagtgacctattgatcagagcagcccatgtctttctcccataaaggtccatatgagttcactccaggttttcaggaaaaccttattctttgagatcattcatagaccaaattccttctatatacttggcactgtcactatttatatgatcagacctgaatttccacctcatctagcttcttgctggtgggaaagcgagagaacatggaggaggtacagtcaatgtcagaaatcacagaccaagcagtggcatgctaaacttctggaaatgtgctgtgcagtaatgtggcagcctcggtattattgctatggaagatgagggtcatcgattttggtgggaaagtagcagcctctccctcagagggagtaacaattgtctacctagcagaagaacaccagcccaatccacactaaacggagatgtaaagaatatgcttccaaatgtggagatgatcaaataacatatcaatgatattttcttggaagaaaagtccgtaaaaattctttggggctttctactttcaaactgaattatgaacgattctcataatttctgtctctttcactagagatgagagaaggaaatatgacctttttctagtcaccaaaacatctacatatttacttattccatgagaacaaagttggcagaataacaatgtgatcacagaataaattaacctcaaactaagagggaaaaaaaaacaactagtgatacaaaattgtcacaaattaagaacactggcaaggtgatakagtcatggtctctttatctcacaaggcaaataaatataaagttttgtggaaatagccttgtatattaaccaaaaaaaaaaaaagcccctcaccaggtctcttgttttgttaagcagctmatgcatagttttgtaaatgaaaatttgatattaatgaytttctaaatgactttttctaatgactttcatgctttggaccaagtatgctggttgggagtcttgcttctaaactataatatgagtattctatctctgccaactcaggttgaactattgctcaggaaacttagaactaataaatcattagctattcattgaatagatactgggtggtctatacccaaatctaggtacttttctttaacatcaatgtcaataattttcaaaatgggaaaataattatgaaagattctatcatatgcaaagcacttccctctgcaccacttttggtacaaagctgagtgacgcaggctgttctctcagtttacatggtgctagaatgatgagccagagtatttatgggagctagatgaagagatacatcaagataagattatcaaatttctgtagtgggtggccagtcagaggaggtagggactaaattgacttggaatggttaggagggcagtagaactctgggggtattattgacctcttcaaacgttagtgttctcatctgtacaatggaagaaataataatactttggacatagacttataaagcacttagagcagaatcatgttcacaatagctagaaataattgccagttgtcattgttgctctttgtgttttagttaacatagttctttgaaagtttgatttgggatgatgaacaggattccaacaattgaaaacactggagtgtaggatgccaggcacatggaatagaatcatcagctgctggatatttcattggtatgaatccagaatgccacaggacttagtatggagttattgagtgaaatgccttttctatgccagatgcctacaacagactgaggcaccaaggtttttctgtccttggtttgtatttagaaagaattattttattaacacaattttatgaatttaccattttacacttttgagggagaactccaccagccactttccatatgttgactacggtaaaataatttttccatgcacatatcaatgacagctcacatatgaagaaacataaaaaacatttctaaggggtcagwcatcagatgacctcaaatggtaattgaattaaggatagttacataatgtcaatttcaattcccctgagaagtctacttgagtcaagtggtaaggaatgaataatttgcaattctgtagagcgaagtagaatctatgaacatggatgcttcttaaaatccaaacaacgacaacaacaaaacagtatttttggcattagttgggtgcttcttagaattttgcagtttggagggattggattcaatacctaatttcttatttggaaatggaaaataaacttgttaatgctaagtgaacctaaatgaaccatagcctttccaagaatttgaactgttgacattcattttcttgaagatatagttcggagtgcctgcagataattttaggagataatacgtgtttatggagtttatgacccatctatttaagaaatcagtcttcatatcggactatatgggaaagaaatgttccattacttttttggctaggaaagttagatcataggataaatatctcccaatggtttagagggaggctttgaaatctgggtccaggacagatcatgatactatcgcctgagggaaactatttcctatgttcatataccatttgttttttaaatgtttaaatcccatattctacattgatattcctttctttaaagctctagtaatctgatttcagagagaaatgagtttctaattatcaggatcttgtccaggcccttcccaaaactaatgaggatgacttattaatattataaattaatagctacttttgttttcgtctttaaatgagggagaacataagataaatcatctttagtttttcagaaaatgatcagaaataatgaaaaatatacacaaaatttacccttttagaatattcctgaagatctatccaatgcatgctaatcattatttatatcatcacaatatctaagaattgcaattgaaccaatataacatgggaacaaaatattttaaatggtatgaaatttacatttccccagtgyatccattgctgagtcagtttcaaaataataaaaactgtatttcttgggcttttaatatctctgatgttggaaagtctctatcacctatcaaaaaatcatccattatttggggtaggtcttgggttgttacacttgaaagagtatctctctgcttctcattttcaaaataatttattgaagtgaaattcagataacataaaactaaccatgttaaagtgagcagctgagtggcatttagtacattctcaaagtgttacagccactacccttatctagttccaaaacatttctatcactccaaagtaaaacccctaacctattaagcagtttctctctattccgctctctgcagcccctggcaattgccaatctatgtgatgtctcatctgcttctcctttcttgattcattctttttagcaagggttcttaccatggtttttgcttccataaagtcatctgacagtacctcgctgccatcatttacaacgtaagaaagctgatactagagccaagggtacaatctcactcttggtggttactaagctgcaatatccccctgcagcctggctgctatcaaatctccctggttaccstatctcctgggaatttttgctgccatgagcaatatacaggagtcttcaaaaatgccagtgataatgtattttctggatccattaatgcccctaagccactgtgggtagaatatgtctctcttcccttttgcatttttctttatcatgtgggtaatagaaatgaatcactcacccctgtaatttctctgcctatgatggaggatgatttttcattaattaagcacttttttattaattaatttcagcctactttgtttctaccattataattagagaccatctttgggagagagggtgctgggtcagaaagcaaatttcaatagcaaacgaccagttatgatcagattcaactctcatgtctgacaaccaaagcatattacagacccaaatttacttatctgctgctatcttcatttagagagtgttatttccaagaagatcttatcccatcctttaaagatgctcctgataggccatgtgtaattattccagacacacccaaaaatgtctcaatggaagtggattttagcttgaatttaggttcaatgtggaactctatctaaatacaaatataaaactttatattggaaaaataacaaactgagataattttgtaatgtttaacagtaaattaaccaagagtgtctgtaaaagggaaaaggtgaaagaacagattcaaattaggaaagatcttccaacacacatgcgtttatgtatctacataacagttaagcaaaaataaaactataatgtaagaaactaagaacatcttctaatatcaattgctattcataagaaaaagtttcacaaaataaatacaaactcaaaatggagacccataaaaatctagcagatttatagctcaatgggtttttttctttaaatgactgtgactgtttttctcttctgattgaaaaaaaattccatttcattcagtatagcaagctagagaatgtgaaaattcttcttctaaaacacagctaaatatgcaagatacaaatataataagtagccatcaaatgcatactttgctagataagaaaggaagaaaatctcaggaagtcaaaagaacaaagaggaaactaagaattgggcggtaaacaaattattcctgcccttgagaattttcagctttaatagccaaatagcttaatagccaagtaaggggagcagtcagggttgcatgaagaggaagcaggaactgagaggccacatctttgaatagcttacagtcacgaaagaatataatagaaaaatatgttctctgaatgcctagatgggaagtcaacatgatcatagctcttaacctgggcagtagtgtgggtggggaaaaaaagttattccttccatactcattgtcagtgtttcagcacttagacttaaaactgcagcccctcccaaatgtctatcaaaggaatatcagaaagaaagaataaaatgttccttcgtcctccgaggtaacaaaggaacagatataattttatgtcttgcatttagttctgattatgtggtaaattgagaacatttacaaaatcatctcaatatgattcttctttcccatataaagatttgtataagtgtataatcctattctattccataacacacccttggaagtgttatttaaacaaacaagccttttaagacattcaaactttgaagattactgctgtgttttatgcaatgtatcttccaaatgttcttgtatgtgttttgcctaagtaatactatttaaattggtaaattactttgagatatttatggtaagtccagaagaagaactttagaatttcttctttcatttatgcwtaaagacataatccatcttataattctgttgaattatttagttaaacaatgatttgaggctattttttaatcaaagtcaacacaagacaataccaaaaagagcacaaagttttttaaaagatcaaattaaactctacaaaataaagtcattgaaattaaaaactcaatgtgtaaaacaaacagcaaatttaaaaatagctgaatagagattaagtagactagagtatagatataagaaatttatctaggatgcagcagaggaaatcaagatataggaattctgaaatagatttaaaaatacagaggttagagtgagaaggtccaatgtatgtctaataaaaataaagactaagaaatcttcaaaactaatgaaaacaatgaaacccagattaaggtatcagactgaatccacaaaagaataaacatttagacatatcatagtaaaaacaatatcatggaaaaggaagagagaagatgacatgtataagtgactgacagaaaaaaataagctgataacatagaaatattatttaatccaaatttttaatgaagaaaatgtcagaaaaaaaggaaagtttcccaacttctgattatggtaatggcaaaacaaataatttggactgaagcctttcgtgaagaacaactgtaatatctggacaaggtacttatataaacaaatctcttaaacatataaaattgctaaccagatggtgacacactattgggctagattctagggcaagatggaggtcctggaaaggaatcccagtgtttgggttacctttactttgggggcattttctgggtgcagaaggtatacctgaatatctgagaggctgtggtacacaattgtcaacttcatggtacttagtgcagagcctgcagagaagtggtgggaattgtcctgatgaaagccacttactttgatgccagaatactagagtccggtgttattttggaagaactagagacaccaggagtttaacagtagcaaatacacatattctttgaaagaaggtaatattgtcataggtctgtgattatttctatacacaaaattttaaattcaatgcctaggacataatgtctagcaggattataaaaaaaaaagaaatcttgaacaaaattctgaggaaacaacagacgatatgaagagaaatggagaggtttcgtatattggatttatccaatatagactttaaaatatctgtgtttaaaagataaaactgaaaatttcagaagaggcttggaaaccaaaaaaaaataacaaaataattattaaaataacaaagacctatatcaagaattcactggatgaactgttgaatagtaattggacatagttgaaggaagaattaataaattggttagggtgtaagaaaattccaataatgcatcacaaagagatacaataataaaaaatagagmagagaggatgaatgactaaaggatgcaatgacatatctaataaagcataacttgagttcttaaagaagaggagaagaatagaacacaagctatatctcagaactttcccaaacttatgaatgtcataaagactcagattcaatcatagatgacacaaacacatagaaaaacattccatctcatggactggaagaatcaatattgttaaaatggccgtactgcccaaagcactgtacagattcaatactattccaatcaaactaccaacatcattttacacagaactagaaaaaagtattttaaaatttacatgaaaccaaaaaagagctcatatacccaaagtgatcctaagcaaaaagaacaaaactggaagcatcayactacccaacttcaaactatactgtaaggctgcagtaatcaaaacagcatggtactggtacaaaaacagacacatagaccagtggaacagaatagagaactcagaaatagagccacacacctacagctgtctgatctttgataagttgacaaaaataagcaatgggaaaaggactccctagtcagtataatgacgcagagatagtggcctagccatacgaagaataaaactggacccctacctttcaccacatagaaaaattaaattaagatggattaaagatttaaatgtaagacctcaaactataagaatcctcgaagaaaacctaggaaattccattctggacattagccttgggaagaagtttatgactacgtcctcaaaagcaattgcaacaaaaatgaaagttgacaggtaggacctaattaaactaaagagcttctgcagggcaaaagaaactatcaacagagtaaatgaacaacctaaagaatgggaaaaaacatctgcaaaccatgcatctgacaaaggtctaatttccagaatctataaggaacttaaccaattcaacaagtgaaaaataaccccattaaaaagtgggcaaaagacatgagcagatacttctcaaatgaagacatacgagcagccaacaaacaaacgaaaaaatgctccacatcactaatcatcagaaaatgcaaattaagaccacaatgagatactatcttacacatatcaaaatggctatcattaaaaagtgaaaaacaacagatactggtgaggctgcagagaaaagggaagacttatacattgttggtggaaatgtaaattagttcagccactgtggaaagcagttttggagatttcttaaagaacttagaactgtcatttaacccagcaatcctattacttggtatacacccacagaaaaataaataattctaccaaaaagacatatgcacttgtacatttattgcagcactattctcaatagcaaatacatggaatcaacttgggtgcctgacaatggtgtattggataaagaaaatgtggtacatatacaccatggaatactatccagacataaaaaagaagaaaattatgtcctttgcagcaacatggatgcagctgaaagccattattctaggcaaattaatgcagaaacagaaaaataaatacatgttctcacttataagtgggagctaagcattggttacacatggacataaagatgggaacagtagacactggagactactagagagtggatgagggataagggctgaaaaactacctattgggtactgtgctcagtacctgagtgacagaatcatttataccccaaacctcagcctcacataatatacccatgtaacaaacctgcatatgtaccccctaaatctaaaataaaaatttatttttttaaaaaaaagactcagattcaagaagccctacgaagcaggacaaatacaaagaaatccaggctgaggcaggaggatttgtggagcccaggatttcaaggccagcctggacaacatagaaagaccccatctattttattttttaaaaggaagaataaaagaaaatcaaaagaaatccagtcacaggaacatctcagtgaagctgaagaaaaagaaaaagataaaaagaagaaaacacttttatcaacaagaacaaccaaaaagacaaattttcttcaaaggaacaaccattaggttgacagctgatggaacaacacaaaggaaatagatggcattagaatggtatcttcaaagtgctaacataaccgccaacttagaatgtcttttccagccacaatatactccaagaatgaaggtaaaacaaagatttcttcagaccagaaaaaaaaatctgatagaattcatcaccagcaaactttcactaaaagaaataaaatgaatcactaaagggcatttttcaggtggagataaaattattctaggtatgagtctggagatgcagaaataaagaacaatagaaaggaaaaayatgtcaatatatctaaacaaacgtatctcaataaatgtataaaacaatataaatataatgtctggttgtatttaaaatacctgattaagatctacttgaatttttatgctatgtatatgtataaatgatttttaaaacatttaaaagaaattaaaagaacagatttcttctcccagccaagatgaaattaaaaagactgcatttgccttcaaacctgtaacaacaaaatttacaaaaactcttccaaaaaatcaaacaaaaagaaatattttgaactcattctatgaagtccagattatcctgataacaaaactggacaaaaacgttttaaaaaattgtagataatatccttctgaaacagagatgcaaaaattcttaaaatttcagcaatcaaacccaaaaggtatatacaaagttactacttcacaaccaagtaagaattatcccaggaatggaacattggtttaacttttaaaaagcagtcaatggccgggcgcttagctcaggcctataatctcagcactttgggaggctgaggcaagcagatcacttgaggtcaggagttcgagaccagcctggccaaccacggccaacatggtgaaaccccatctctagtaaaaatacaaaaattagcccgacgcagtggtgggcacctataatcccagctactcaggtggctgaggcaggagaatcgcttgaacctgggaggtggaggttgcagtgagcagagatcaggccactgtactccagcagagcaagattccatcaaaaaaaaaaaaaaagcagtaagtgcaagtcaccatttgattgtctcaatatatgaaggaaaagcatttggcaaattcaccatccattcctgatttaaatgaaagaactctcagcaaactaagaataggaacatcttctacctggtaaagggtctctaagaatgatcaacagctaacattataataaaggtttaagacattttcccatgataagaaagaagatggatatttgcctctcactacttctattcaacattttactgcagatcctatacaacatgatctggcaagaaaaataaataaaatggcgctcggattgaaaaggaagaagtaaaatagtctttatttgcagatgacatgttaacgtatgtagaaaatctaaataaatctaccaggaagacaaaagataataagactaacaagtgggtttggcaaggtttcaggatataagatcaatatacaaaaaacaattgcattttacagactaacaacaaactatagaaaattgaaatttaaaatgcaatttacaagagcatagcaaactgaaatacttaggaatagatgtgacaaaagatcaggtacaagacctgcacagtaaaaaccataaaacgttactgagagttagcatataattcagcaatctcacttctgggtatagagcaggtcctccaataacattgctttgttcaacatcttttcattataacattgctgagggaaaaaaatcgatttccagctgggccactgtctgtataaggagtttgcagattctccccatgtccttgtgggctttctccgggcgctctggtttcttctcacgtctcaaatctgtgcatgttaggttaggtgaacaggcatgcctacgtggtcccagcctgcrtgagtataggtgtgcttgtgtgagtttgccctgcaatgggatggcatcctggtcaagactagttacctcctggtgccctgagctgcttgataggcttggcaacccacaaccctgaaatggaatcagcaggtaaataatcatcttgtttgtactaatctttcttaaatgtatgtatagctcacatttatttcaacatttaatattagaagtgttttggtccttactcagaagtttgttgatgtttttgtgaccagaaacatgccataggaatttaactattcttcatatcaattcgcctatggtaaaattggttttgttacatgccattcctcctaaaattgctgtttcaagaacctatcaatgacattaagtgaggacttactatttatctaaaggaattgaaatctgtatcattaagagatatctgcaccctcatgtttattgcagcattattcacaacagccaagatatggaacaacctaagtatccatggatagatgaatgaataaagacaatgtgggatccatatacagtagaatattattcagcctttatgaggaaggaaatcctgccatttgcaataacacaaatgaatctcaaagacattacactaagtaaaataagccagacacagaacgacacgcatgatctgacttatatgcagaatctaaaaaagtggaactcataaaagcaaagagaaaaatgttggttaccaggtgaaggaagtgggggcaatgggaatatgttggtcaaaaggtatagatattcagttatatggatgagtaagttctggaaatctaatgtacggcatggtgaatatagttgataatactgtactgcatacttgaaatttgctgagagtggatttgaagtgttctcaccataaaaaaaaaaggtgaaataaatctggagtaaaaaatagaatatccagtaatattaatatgcattaaacattgaagtaaatatccagaacaatgatgttgcaatgatatatgttgggagagatgtaaatagaatttaaaatgttctattgtgtttggattcactgaggaaaagagtaaaagtactaattaattttagtctttgataaattaaaaaatacatgcaatttctagaataaccacaaaaagaagagtaaaaataatatataattccaacctaatacaacaaggaattctaatcataactatgagagatgattgatatggtagtttgcactaktaatcattttacaatgtatacatatatcaaattataaagctgtatacctttaatatataaaatttttatttgtcaagtatacctcagtaagtctggaaaaacttagaaagatccaagtcgtttatcacttatactaaatataaaaaataccaaaaaatgactgtgaaaaattaaagaagaaataaatgggatatatatgtcatatttgtgtgtgtgtgtatttacttattctaaacttgtaagcacataaaaaacagccttactcttgtaagccacaaagattttgcggttgtttattactaaccaatagagaaattttaaagtgcacatcaaaataacccatgaatcaaggaaaagatcataatgggagttaaaaagtattttgaattgagcaaacgagaaaatgctatacagaaacttatggatgctgctaaagacatgcttagggggaaatttagggctttaaatgaaaaaaaaagaaaagctggaaaattaaatatctaagtwtcaagaagttagagaaggaacatcaaaacaacctaaagaaaatagaatgaaggaaacaataagaacagaaattaataaaaacaaacaaacatagagaggatcaacaaagtccaaaattctttgaaaaactagtccaggcgcagtggctcatgcctgtaatcccagcaactttgggaggccaaggtgggtggatctcgaggtcaggagatggagaccatcctggccaacatggtgaaaccacatctctactaaaaatacaaaaattagcccggtgttgtggcacgcacctgtagtcccagctacctgggaggctgaggcagaagaatcgcttgaacccagaaggcagagcttgcagtgagctgagatccagccactgcactccagcctggcgacagagcgagactctgtctcaaaaaaaaaaaaaagaaaaaaagaaaaactagcaaagttcacaatctcctgacaagactggtcaagaatgtgaacctctacagactctcaaatagtgaaattaagccaagaaggaaatactgagattaaataatgaataataagtgaagaaaatttaataaacaggtaaagtaaaataggaattgagtgaataaaataataatgatataattatgactcatttgggtgctataaatcaaggtggaacaaaaatttataacagacaacgataatatgtagaataggacaatgagagtgttcaaaaatccctgaattctttgtaagaaaaaaatagtaattatatttacatgtaagtttgttaaaatttttaggttaacaaaaagcatttcttccaaacaagaacagaagtgaaaaagtaggaataaataaattactagtattattattattaatattattattatttgagatggagtcttcctctgtcgcccaggctggagtgtagtggcacaatctcacctcactgcaacctctgcctcccaggttcaagcgattctcctgcctcagcctcctgagtagttgggactacaggcacatgcccccacgtctggctaatttttgtatttttaatagagatggagtttcaccatgttggccagtctggtctcaaacccctgacctcaagtgatctgcccaccttggcctcccaaagtgctgggattacaggcgtgagccaccatacccggccaggaataaataaattataatcagtaaaacagaagataggcaagaagaagagtgtggagcagaaactgctagttacctctgcaatagtcattctccccatttttaatacaacaagcactcctttcttttttatgtgtaaactttaagttctgggatgcatgtgtagaacatgcaggtttgttacataggtatacacgtgtcatggtggtttgccgcacccatcaacccattatctacattaggtatttctcctaatgctatctctcccctaaccccccccaccccccaacaggcccccgagtgtgatgttcccctccctgtgtccatgtgttctcattgttcaactcccacttatgagtgagaacatgcagtgtttggttttctgttcctgtgttagagtgctgagaatgatggtttccagcttcatccctgtccctgcaaaggacacaaactcatccttttttatggctgcatagtattccatggtgtatacatgccacgttttctttatccagtctatcactgattggcatttggattggttctaagtctttgctattgtgaatagtgctgcaataaacataygtgtgaatgtgtctttatagcagcatgatttataatcctttgggtatatacccagcaatgggatggctgggccaaatggtatttctagttctagatcctcgaggaattgccacactgtcttccacaatggttgaactaatttacgctcccaccaacagtgtaaaagcattcctgtttctccacatcctctccagcatctgttgtttcctgactttttaatgatcygcattctaattggcatgagatgatatctgattgtggttttgatttgcatttctctaatgaccagtgatgatgagctttctttcatatgtttcttggccacataaatgtcttctttggagaagtgtctgttcatattcttctcccactttttgatggggttgttcaggtaaatttaagttctttgtagattctggatattaacccttacaagcactgatttttaactatgaaccaggctacctagagaaagcttacaatctttatttacccttatagctaggtatggacatgagactaagctaaggtcartgagctccaagcttcagggaaacctcctcaaaatgtagatggaccctagagctttgtcactttcctctgagtcctggaatttaaatgtratggttggagttctagcagtcttctcttatcaggaggcaaagagccataccttagggatgttagagcagtgagctggaagcagcctctgtctttccattctgacaccatggctgccatggacaacctgcttacaatctgtttaygtgagagaagaatccatttccatcttgaatatttattttgggttttgcatsagaggcagccaaatttaatcctaactgatctaaagacaaagagaaagcacaagtacatcagtaattacaatagatataaataaaggagtaaatatatatacacattaaatacatattaaacataaacgttaaataaagacaggttggataaaaagcagtccagctgtatgctctttaaaacctaaatctaaaatataaggacactggaaatttgaaagtgttaatttgtttcattaaataaaattaatattttaacagaaaaaaaaaaagtcaagaaactgccaatgcctgaagttcggttggtgttgttttgtcctaatcagagacaggaaattcaagaaaaagattatgttgcaaaaatgataatgtgttcctttagtggtcttaaaatataaaataaaggactaggtagtaacctaagtgaaaggcgactagaataaataatagagatagatcgaggtctatgttggagtgcagttattctcaaagttgagcatgaatcagaatcacctggagggcttgttacaccacaaattgctgagccccacccgagagtttctgattcagtaggtctaagatggggtcagacactgcatttctaaaagattgccagtggatgtagttgttgctccaactttgagaacctttactactcagcttcatggttgcattatgaggaaatggaacccagagctgctccaatgattctgacagctgaccacacattagaattacctaaggcactttaaacgcacttgggctcaaactactcctacagagtcagaatcttttattttttgtttgtttgttttgaattccccaggtgattttaatgtgtagcagagaggctaaaactattcttcaggtcttctgacagtttaagaagttaaaatctggggtttaaaatgtttctaatttgtacagtattgcacagtccacataaaacaaatatgctggctctcaggtttgcaaacccagcaacatgatgaggtgtggcatttagcttagttatctgaccagcagttgaaatgcaaagccagggcctggaagataaatttggattgtggtcatagatctggatatgtatgtataactttaaaatgtgaaaacaaattcaagcaagcaaatgcaaaccaaaagttttatattctccaaatataataattactttaaaaagcaaaagctttcacagaaatcgttatttattgcataatacgtttgcaatataataaagatttataatgcaaccaaaactggaaggtttttaaaatgtaactctttcttcctctctcaccatataacatacttgctcctttgcttctgcgatgagtaaaagctttctgaggcttcaacagaagcagagcagacgctggtgccatgcttgttcagcctgcagaattgtcagccaaataaacctctttaaaagaaaattataacttatctagtctcaggtatttctttaaagcaacataaaatgcattaacatcaaaaattagtaccaaggagtgaggcatttctataaagatacttgaaaatgtgagcagctttggaactgggtaacaggaagacattcgaagagtttgttggggagggggtactcggaagaggacagaaagatgagagaaagtttggaacctcttggaaactggttaagtgattgtgaccaaaacgctgatagaaatatggacagtgaagaccaggctgatgaggtctcagatggaaataaggaatttattggaaactggagcaaaggttacctttgttatgccctagcaaagaacctggctgcattgtgtccatgctgtagggatttatggaagtttaaacttaagtgtaatgacttagaatctggcaggaaaaaatttctaagcagcaaagcactgaagatgtggcatggctgcttctaacaacctatgatcagatttaggagcaaaggaaaaacttaaagttgtaacttataattaaaagcaaagcagagtgtaaaaattcagaaaattttcagcctgaacatgtggtagagaaggaaagagcattttcgggagaagaatccaccagctggaggaaaaaccacttgctagagagatttgcataactaaaagggagccaagtgctaatattcaagacaaggagagaaaggcctcaaagccatttcaaagccctcccaccacagacccagaggcttaggaaggaagagtggttctcggggtcagattcagagccctgctgccctacactaccttgggacattgctccccataccaggcctctctggctctagccttggctcaaaaggctttagacactgctctggccactgcttcagaggatgaaaccataaggcttggcagcttccatgcaatgttaagtctgcaggtattcagactggtgcccaggcaggaacctgatgcaggggcagagctcccacataggacttctactagagaagtgctaagtggaaatggggttagagccccaaacagagtcctcaccagggcattgcctagtggagctgtaggaatggggccactgccctctaggcccagaatgggagcgccgccagcagcctgtackctgagcctggaaatgctgcaggcattcactccagcccttgcaaacagccatgtgggttgtgcccagcaaagccatggggacagggctaccagaggcctcaggaccacatttctcacaccagaatgctgagcatggagtcaaggattacgctggagctttaaggtttaacaactaccctgatggattttgaacttgtgtaggtcccattgcccctttcttttggccaatttctcccttttggaatgggaatgtttaccaagtgcctgtactaccattgtatattggaagtaaacaacttgtttattattttacagactcacaggtaaaagaaacttgccttgagtctcagatgaggcttgagacttcgaacttttgagttgatgctggaacaagctaggattctggaggactattgaaaaggaatgatgtattttgccatgtgagaagaacatgagatttgggggaactggggcagaataatatattttggatgtttttcccccacaaatcttatgttgaaatgtaatctccagtgctgaaggtggggtctagtgggaggtgtttgtgtcatgcaggtggatctctcatgaatgacttggtgctctccccacggtaataaatttacaggagagctggttataagaagagcctgacacatttccccctctctcttgctccctctctctccatgtgacatatatgctccccctttgccttctgccatgagtaaaagcttccggaggcttcaccagaagctgagcagatgctggtgccatgcttgtacagcctacagaaacatgagccaaataaacctctttctcatctttactctctctatatatacacatacatatatatacataaatatatatgtatataaaatatataaaacacctgatgagtttttcattgtaaggtacagatagaaagcttacctttatttaaattagaatatttagatagtaacaataaacctgaatgacacaaagaatgacgggtgcatgatcaatgacaacatatacattttgacacctatgaacttgaacttttattgattagtgcattagtttccaatggctgctgtaacagttataaacttggcggtttaaaacaacacttttagaagccagagatctgaaatcagtttcactggccaatatcaaaggagtggacaggtcaggctctctccagagattctaggaaagaatccattgtcttatgttttccagtttatagagctttattctttaattatttgtcttctggtccccttcaatagcttcaaaatattgattcattgccagggcaggggtggtaagaaaagttgtttatatgaaaattaaactgaatatattacaaacaatatcatcaaatttctaaacacattgttggataatctgcatgagaattataaaaaaaaaaaaaagaaaaaattgtggaaatctcaaagtagtctacattttgattgactcattgatgtctttcrtgtctttctttctacacattaaggaagcaaactggaaactagacaaaacactatgagtactatttatgcaagattatttcaaattccaagcagcaaatccagttccaagaaatggcctcaacccataaggtttagcaaaaacctatttaaactcaaataattatcttacagaggctttaatgtactgtttcttttagtgaccttactaatcagttagtgtcctggttagaccagattagaggggcatctatcctatctcagtaacacaagccaaagagaagaacaatgaaaagatatgtaaagagcaggagaaatcagaggtgaggaaatttttccaattgaagaagaatggcatgtgaacagaaattagtcaacaaatacatatgttcatatacttgaattctgccttccacttccatttttaacatcaacttgtcaactaagtacagactctctcactacatacaagatccacttttcccaaattattaaaactcaaataagcataagagcaatgtggtatctgataaaaatgtagtaatcaaaagcatagggatagatttcttgctaggtttaccaacaggcagacatgctaaggcaacagagaatagttaggggagtggtcatgtaactggagtaggagaggttcatcttcaataaatggttccagcatcttgaaatcaggaaatatgaaaagaaactgtcttagttcattcaggctgctataacaaaaattaatttctcacagttctggaagcttgaagtctgaaattagggtgccaacatagttgggttctggtgagagccctcttttgggttacagattgccaatgtctcattgcatccacacatggcagaaacagcgagagatctctctggagtcccttttataaaagcactgatccattcatgagggtcctaccctcataacctcattacctcctaatatgatttggctctgtgttcccacccaaatctcaccttgaattgtagttcccataatccccacatgtcatgggagggatccggtgggatgtactttaatcatggaggggggttaccgtcatcctgttctcatgataataagtgaattctcatgagatctgatggttttataagggggttttcccccttttgctgagcacttctccttgctgccaccatgtgaagaaggacgtgtttgcttccccttccactgtgattgtaagtttcctaaggcctccccagccatgctgaactgtgagtcaattaaacctctttcctttataaattacccagtctcaagtatgtctttattagtagcatgggaatggactaatacacctcccaaaggctccatctcctaataccatcacatggggggttaggatttcaacatatccattgtgactggacaaaaaaaattcagtccattgcagaagctatttttaattcatcatatgacttttttcaacatttttttaaaaattttaagtcctgggtggcagattaggttccttttatcttttcaggaactgaggattggacggagttctggagatgtttgttgtaaaatgaaagagtagtttcaagaatggttgaagtcataatctatatgtttcttggtataatgaaagctttcacaaatggctggagaagtcaaattcaagagatgaataaactatcctcttatgtttcttgcttctctctccatatgtgtgtgtgcctgtgtgtgtgtgtgtgtgtgatttagtttgttcataaggaggaaaaagaagatgaaacatcatttgtcgattactctcaagttaaagggacagctcctcctctgctgcatagtcctggcataccataaaaacgtacaatcctgggtccagttctaaaatgtgcaaccttggtccctaggttctcacaaaagccattatttcctctgtaaggaatagaagtagtctgatgaaatcttttcctcatatgcagcaattcccagaaatatgctattctacaaaataagctctcagggcaggatgatgtttacctcaaaaatataggtctcaggccctgtggtttctaggcagaaaagatctgcttaagtgaggttagggctaaagaattatggatgcataaatgatacttagtaaatatttgctgaaattaaatgggcaggtgtggtaacctgtctccaaagcaactccttttgcctacattcaggaatgcctggtataaagggactgttcttacataattatccaataaaatacaattgagaatgatcatataagaagtgagatgacaagccaagtatgttatgaagccttgagctttcatcgcctggacatcaaataaaccagtatttgaatccacaaacaactgtgactctgggagaagaaagcagcaaaacacagctgtttgggcatggccagagcgccactctcaagttatgtaacagctgttgtgtaattgtgcatttaactcaaaacacatttttgagagagaaaacaattagactttccaaaaagaaagaaacagagaaatgttgaaagaacacagaagtttctatctggtcatcaaacataagacacgggggagtcaaaggcattgggaatgatattgccttagaatctagggagttggcccgtgcaccaaatctggcctgccttctgtctttttaaataaagttctataggaaaacaactacacccattaatttacctatcatctacagtttcttttaaatagagtcaagtaaattatatcagaaaccatccagcccagaggctgaaaatatttacagaaaaagttttgcaaattcttgtcttagatgaataaaaagttatgtttaaatgcctgtaagggtgactattcactgagaaaaccaaagcagttgatgcttgaacccatgtaggagttctcttgtggagaatagggtagaaatagtaaacagaaataagagtccaggtttgggagtcagactggcctgaaatgaaattctggtcctgcactaatagatctgtgaccataagtaagctactcaccctctgtatgtctctaaaatggggatatgaaatgagggtagaaagggaaacaagtgctgcacctgatttgggcaaacaattcagaaatttttagtttccctatgtaagtcccatattcaggggaattggcaagtttcactagaaaaaaaaaaattggttgattctccacaatcagagcatccagagtattttatcttgttcctattgtaacgtttgctagagctacaatacaataaagtattgtacttaaaatgggagtaacactgtttaaaaaattgtccttcagctaaayattaatttaagaacttgaattgtttggaagccctgcttaaatttagtctttgtacactgcctatgttgataaatacagacaacttccaaaaccaggattactttcattttaaatgagtattaatagatgatattgccatatttctaattgtggtgattgtgtgtgacagtgtgttccgaattccctaaaagtcctgctggcttttctgttcacatatagaaaataaagataatttagggcttctgagatcacagtaggtctacttacccagcactgaaaatacacaagactgatacgatattttaaaactaacttagggtagggtgtagataaagggcctttcttccccaaacagcaccttgattttctgggagatggactgatttcctgaaagccttgtcctgaagacacctggccagggttctctcctcaccagcttctactgagaacaagtgcccttttagactcttttcaatcctcaaattctctgattccaagtctgtcagagaacagaaagttacatagtagcattaaaaagcatgagaagtcaaaaaaataataactggccttagtggccagagcagctgctgcatacacttatcacaggtttcggctttgtaaattaattcatctgcaaatagtgcactgtctccaggtacaaattcgatgctggagcactggtttcttaaggatttaagtttaaagtcaaaggcttcctgccctaggtgttacaaataagtagtgtcgttttctttttttgctctgagtttgttcatccaatcgtatccgagtatgcaaataaactttagcccgtgcagataaaaaaggaacaaataaagccaagtgctctatcagaaccaaattgctgagccagtcacctgtgttccaggagccgaatcagaaatgtcatcctcaggcacgccagacttacctgtcctactcaccgatttgaagattcaatatactaaggtgagtaaaacttctattttctgctttgactcgggtttgcaaaaactgcatttatgtaaagcattaaaggtcaatttaagtaaacttgtgtaaagagccctttgcaaatataaaaataaaaggcatgcaaaatgcaggtctcagtttagtgtcctgatcaaatatgatctaaatcatatcagacaatctttcataaatttatttcttaaaatatttccaagcgaaaggaattctcttctgtgtgaaaggattcttataccaggattcagaggactttactaagcacttctattaacttcactatagccggcatgtatgataagagagcaaaatactcactagagaagcttactggaaagaaccaaacgagtaggaacaatagaaagcaaacaaggagaaagagagcatactgaaataacataactttccaatatgtttaataaaatgagtgttaaaatagggggacttaagtctgataattggattcgaaaatcttcagatggacttgcattattttgcatattttggtgggaggaagaaaagcattatttcttcagccaagtttgttgccattggagcagatgtgtaattgttaactgataaatatttagagaaacaagagcaggagctagatccagactttaaaatccgcagctggggggaactaggaaatggatcctgcttgagtcgttctgagagtaactctgaactttgcctgtttcacactgctttcctgtcagatcctagaactccaaaacaaacaaatgaataaaacacaatctaaccaaaattacttgaagttatctttatggtgtgatgcagaaagtatggtaagaaattaactcttgcaaatcaagagagagccattttgctgtctgaattagccaacagaaaaacaaagggcattataatttaatgataaagtaaaagtccccactgttatatatttatttcctcacttgtaaccatggatggctttgaaatcccaaggtctgttgcattttcattttcataaagcacaacaaatgaggaagttgctcagctgattggctcttttcctcaggaaagtagcagcagagatcagattgtgcctttaacatggttgaccagcagctatgaagtgtattttaaggtattgttatcacgaggttttgttaaagaggaaagattttttccatttagttttactacaaatggtagcatgaaaaatgcagtaaatccataccgtcaaacaatttacatttggcaaaggtatgtccaaaaggttgcaagagtccagtctccctcattttcttattccaagtttgtcattcacaagaaatttcaattgaaagtgggtacatttaaaaatacatttcatgaagctcaaaattgtcgacaatgctcagattattgtattactattattaatgggattttttttttaataatactacctaggaagatattttggtagtctggatgcccctgtctccccactcctttggctttgcagaagtttgcaaagtcttccttgtgtgtgtatttcaaggaagctctaatgtaaataaccttcctgctaaattaagcttcacttagtagtcattaactaagcatgtaagaagcggtactagacaaatgagatggtcctaaaaatctaacatacaagcacagacctaatgaacccttaacacagagagatgattttgagattgaaacctattcacttcgaagtcactgtgcaacaactcccctctagggaaagtgactgacctaagtgtccaaaagaaggcaagactcaaagagcaggcgttttgctctgtgtttaagaacttttctgggtaaaaatactccaaacaagtcagtgaattttgatttctcgtgcatcttctatataaatctgttctgctcagatagcattttattgtttaatttattggttacagcgttttcacacttgggaggacgccagttatgtatgtaattaaatctaaatgggtgaactttttcaaatgccttcgcattttttgtttactatgtcccagtgaagaattggattgaatttgctcttgcaagaggagttaaaaaaaaaaatgatggttattaactataaaaagttccctggttacaaaccaagtaagcaaggagtttatagtgtctgaggaattatcttctattaccagcccctaaagtcttgtgttatttttctgttactattctaatgtccttttttattattattatagctagaagtatattggttgttaggacaagttggagagaacagacagggttgagtaaaaaaaaaaatattacaactacgatagaaaagctacatactctcaagcttgggactgcttttcacccaaacaaaagaatttattgatgcatatgtttttatgacttattttctagtacagtctgattatttctttgttggggtagattaaagagagatcagagtttaagaaatgctttctaaaattatacaaaagcttttggaatttaaaacctcaaaaacatcgctataaattcactaatatgaactcatatcccatccttatcctcattactcctctttccaactctaaatgaaccccacattttccattttattgagcctttaaatgaagagattctttgaaagttatgtgatcattgggcaagctacattacttctctctgcctcggttttcttatgtttaaaatggggatgataaaggcacgtattttctaaggtcgatgaaagtattaaacgaacttaatgcgtacaaagcccttgaaataatgcctggacatgggaaatgatttaacgttagtgatcctagtcctatttttctgaatcctttccagtttttccagaatwttcccttttacccaacctttcctagacctgtttcctacaagtatgcctcacgtcttctcctagcttttctgtcactcttttttgtacagtcatgtcccatctgacaaagattgcatcagagtgaagttccaagggtcttccaagatttcagggatcaaaaattttctcctacaggattcggtaactttgtttgccattctctcttcacaatactgttgttttaccttttcttttttcttttttttttttttataaaagggaaataggaaattcaagaagacaagcattctcagacagaattcaaacgccaaaatgtttaacttaattagtaagcttcacttattaaaccatggtttgttcatgctacaaaagaccttcatcagctaatgacattttactcatacatacacacacacacacacacacacgcacacacacacacaataaataattataggtaaaatttattgtgcttactctgccatgactgtttaagttcttgacaatgattttatttactcctcataataaccctatgaggaggttactattcctgtttcacagttcagggaactgaggaacagagcggctatgtaacttactaaagttacacagcaagtaagtgacaaagctacactgccaatgctggcagtttgagctaacacactarcaagagacttgtctaaggtcaattccactactctgggacactgacttgccagaatcctcttgtatccttcttcatcctgactttcatttgcccattgctgattaccatggtctttccagctgctgctcagctgttcccaggccaataagagaaagtttgcagccaacttagaaaaagagaacaatagggaaattgaaaggaaataggttttctgctttgactgaaaatgtgacgtttgggctaggagaggctatgaggcagaggactttgacatggatgtgaaatgtctgtgtgaactacatttcttcaactcctatggaatcgattttggttagagtaggagattgctttcctagatttctggttttgtttaacccttctgggttaaagagatattttcaatggagaagagttatgaatcattgaataatacgtcccaggcacgatttgaagtgcttcttttcccccatgattatctctttaaattcttacaacaaacaaattcagctacatgaacttccaaatacctcctttgtcccctttgcttgtttctcccttttgcttttcgtttctcccatatttcccttcctcttatttaacaaggccttgaatgagtgccctatgctagttctcatgatataagagggctaatatgattcacgtctcatgcagcctctgttcctggaaggtgtgtggaatagtgtggggcagaaaataagagaatgctttaatcagaaattaggataaatgtttaaagcaaaataactgaaagctgagagratatgagtagaagagcttttgatgaggatttttgggaaggtgctttaaaggtaagcctgagggatgtagagaataaggtggccaagagtagggaagaacaaagatccagaggtcttaccacatgcaaagaccccgaggacaagagcatgttatgctcaaagaactatccaaaggctaatctggctggagtaaagtgaataagggagagaatggatgagatgaaactgaagtacaggctggggccagatcggctggcggattttgaggaagatcactgagaggtgcttaaaacaggaaaggacttatgttcaacgcaaagctgattgtgctgtgatgctgctttcacttgggaaatgtttttaacttccttccaactgaagcaatattttgtttgctttgggcttggaagcaggtgaaaaaaatagctgactggctgcaaggtgcagtgactgaacaagctaaacctggcttcaatttccagctattctatgtatttaattatatgaccttggccaagcttctcatcccctggagcttcagttcctctgtctgtgaattgggaatgagaatgactaccttggaaagtggctgtgagaattaagtgaggtaatttgtggaatgtggctggcacttattaactacttagtcctttctctccttgattctctttcccaagatgactcctagaattatatgatcattctgttctcaatgtaagttatatttatattgcttatcacagctcaaaactgatttcatatatttctctcatttgaggtgcatcattaaccactgagaggagctagaaaagatgttagcagagtcccatttcaaagctgaggagcccgagctcagagatcatgactgacttaaggtcacatagctcttaaaatgcaaaagtagaataaactggattctaaatctttttatcttggatctgatgctttcccacatgatatccttttttccttaaatatcaaaaccagtagtactagaatctcactcaagaaaacctaatcaagaaaaaaatctgaagtaaataacacatatcctaagagaagagggtattatccccctttcccaattagctctaacaactgttttcacacctattactgcatttttatcattcattccttactgtggttgaaagaayagatctaggctgaagtctgagattctgtgttcttaacagtctttcagcttttgctgatgctaccaaaatgtctgttgaccagcagcaagggtctaaaagttttaggtgagtgagccttataacttcaatgcagcaaccaccttccagttacttcacaatagagcttccagtttcttccagaaactagcactcagccacatcagaaactttcctttcagaaagtgccagagctaagcagaaacatgatgatggctacaaaccagtgacagaaccaatcattgattttaatagtgggagataatcatttactaatatttagaatgctcatctctgaggactgctgtcttggcaagttgttttgttttctggcacctgcctgactgtaagaaaatggaattaacaattctaaagtaaagaacacatgtcctaagagagggtattgtccccatttcataagggctctcagtacaactctttatataactttgtaacagggactttaacctattgaatttgtcactacatacttgccagaatgagggaaacactcttagagaatatgaaaaataactcatttgaagaccaacccaaagtaaaggtaatgactctgaaatggcatggataatctataggatgatatgttgcaaatcagcataaaataaatctcacagaaatacagacatcaaacagagatatctgaaaatagcaattatctggcttgggatggtggtgtgggggggtgcactttggtttgatttatcatgatgctattataactatagccaggggatatattatatgtttacaaagtgtaagtgacaacatagaaccatgttcaaaagaatttgagcaaggattgcttcacaaacccttacttagaatccaataaatcagaaaagtaaatctgtgtaatactggttttcctgacgctgacatgttttgggtgtatagatgtatatagcaaaagtatccacaaacttagaagcattgcttgagaaggatgtgaagtgttgctaatattgggttttctgatattatctctacctgattcattgtaacgtttgacttactaatggaaatttgttcactggggaatttgcacaaatctcacatctctaaaaactttgcctgaaccgttccctcccccaaccctggtcccatttccactgactatttccactgctctatcgatacttttttagatgtcaaaggaatacaaataactactgaattatgctttatatttggcatycttttagaaggaagagggcttacatgcgagcaattctattactaggtcttgatactgctaaaaatgggcagaactttctatcgcttctacatcttaactctgatacagaaaatatatgatgtacagaagttgctgacaagttttgttatcatctctaggacacagtgatggagtggctcaaaacaaatgctgtggcatcttttctctttccctgacacaattgaaaaggctgatggggttttgcaaacaacaagaaaaaagagtatatactcacrttactaaagtcagactatcatttaaarcaaatgaaaggaaaattttatttctcctattttttgttttcgtcattctgtcattttgttttcattcatttgatgacagttaaaaattttctttccctttgttatttcctccttaatttccttttacattttctaactttgagtctcaacattttgctttcctgcctcagggttagggtgcaaagcagttgccagagatccagctttgattcttttaaatgtttaacaccccacctgacttttgttcagtctctcctcctcattattcatctccgatctcatactccctgactcccagcggcctttagtactttggtaggttcctaagctgagaaaaggttgacacatttacagcacacaccagtctccacaggttcacaccaccacccatgcagcctatgctgtgactcagttctcaagtttgaaaattcacatggatgacattaaatggggactctcatcaccctccctctcgtttggaaaatcttaaaagaaattctttgtgcattgaaaatgtgatctcttaaaatctctctcccaccaagaaagtattgccttcctttacagactctagggctgctggcccagttgctgccctgccgagataatattaatttaaggcactctgagtatcttttgcaaggagtcaggggctccccactttagcccacagactccaaaatctcatatcagcagataaggcaaatagggctttattttgccactagtcaaaactagctttatccaagccagaaatattttgagaaaattatgcttatttatttagaactgtagatttatacacaatacattaagacataataacttttactctggaaaggcaayttttttcacaattatgactaattcttggacaccagttgaatccaggaaatggctacttgtttatcaaaggtaaaatgatgcatttcttaaaatgtggcatatctaaaatctgaagtgtaaaaatccatttctaagttgcctcaacatttctattgattgcttccccatatagaaagtacttgragtccaagagtatgcataggcatttataatttccaatcaatatttcaaacagaaggttgatgtctactttacatatatattattcaaaagtcacctaagtccaaaattcataattagaattgagttaatatataatggttacatagaacccaagaatattttacttttatagtatcatctcttttcctctaagctggctaaaggcaaaaaacaaatggaaaataatattgtcaccattatagaacattnaacaagcctaatgtaaattttataattattataacaaacattcattagcctagacttctccatataaccattaatataactataggaacagtgattatacaaaaacgtttggtcacacagttagctggaaggcaaatgcccaatgtaaagctcctataattaaaacagaaaaaaaatgtatttgaggtaggccctatgaataaattatctgtagctaaggggaagaaaaagactgggcaatacctggccttctaaccatctaggtcatcacattacctatgccaaattcccttttcatgctgaaacgcctctgtttgtgggagaatggcataattcataatttgtagactgcactgttacatcactctccttcaaaagcctgtgaccttatgataggattatgaaattagtctcaaggctaatttcttggactctggttggtctacttcaaatctacttgggatactttaaaatcagtattcctaaacatccatttgatctggtctctctccctttttatatccagaatasagcctaaacttctttctctggggatcaggatctgccacaaattgactttattttcaatgtcaggccttatctgtgacttatgtccactgcaactccattctgttgggagctgctctgtttactgtgttacaaacctccaaagatttgtccctccctttactctttttttttccttctttccaccaatccagttccatccttcaaagaagcattctttcagcctatgcccctctacaccatttattgacaacaccgctgctttggccattttgctccacagtctttaattctgtactggcggctcttgatatgaatacattctcctcttagattataagcccctgagagcagaggccatggctaactcatctctcatttttccacaataactgccagactatgtctcaagtatttactcattattggacaaacacttttctgataaagcaaaagttactaatcatgattatataaatgtcaacacaagttcaaacacaagttgggctcacagtgtcctcctgtcttaaaggttaaaactgaataatgcagaacagtgctggtaatttggggtcctctacagctgatctcttcagttgcctgcaggctgccagataaacatgtgttattacttcaggttaatgctcatttacaaaacattcactggctttaatctaaagtggcagttttatgtacagcttagatgcaaattctgatcatggaactagatggtacatacatactgtaataattcttttacaaaaaagtgtgtaaagagagtaaaataagctataatatattgagagcatattattgagaacttgaaaccacagattatcacagacctaaggataagaggactcgggcgagaactagaaagtccgaccacaggcctagcaaaatgtaattgattctgtatgttgttttattttatttttaatgaaattacattgtagaagggtgaaattctggatctctgccaaaatgaaatctgtgttcccttagtttacaggtacaaaatctaaggtggtaatacaatctttaggcagagagaaggcagaattcccaagtgaataaatctgatgcaggttttgaaagactgatttaaaagtctacggcaggtatcgcaatatctttagttttttgtttggaattttatgggctgatatgtagatatctaacattaacacaaagcagaacataagtaatttatcagtaggatactaacatgttatgttggaaagaagaaaaaagagattaaattcaattggagcaactagtcaaatcttcatgaggagatgacgcagtaagcyagaatttgaagtaaaaatagaagaaaatagtggaactctagtctaaagaacagtgtgaataaaagcatgctgcaaaaaacagcatggtgtttgaggcagtagaatgaggctggaacaaagggtaaactgagggaatggtagagcaaaagactggaaaagcatgttggagcaagatcgtgaaccacctccagtgccatgttaagcagtctgacaatagaggatcactaaagtattctgaggagggctgtagacagaatctgaggaagattatgatgacaaggtgaaaattaaattttaattaggcagaggtagggggcaaagagaacagggaaagcttttttatacttgtatagaacaaagtgatacaaaagggtacctagggattatttgtgtcattaacagaagaaggaaagtgtgtgagagatagggctgggggacagtgtgcatgagcaagcttcagaactttggggtgagagcagcataaagctagagatgacagtgagctgagttcgggacaagttgattaagttctttcccagccatcccttgagaagaaaaatactaagctgtaagggcataaatggaaacactctaagaataattatgggattctgtaaaatgtatttctgatagctagagtgttgattcactctaagagacattgggcaaatcagcactttcgtctgaatttatttttcctcaagttgatctaagagcctartgttttttcccaaaagataatacaatgaattttatggtcttcatctgtattcagttaatcttgtttctgtaatctgatagggtttcttgatacttcttccatctttctcatttccccatatatgtatttttgcacatctagtctcttcatctgaacagctttgggccccttttccctttatttaggcatgcccatgtgttttaccatcaatttcaggctagtactacaattcctttgaatgcttctaactatacaggataattttcttgtatggaaataatgctgttttcttgtatggaaaattataytggcatgaatgggcaaacaagacggcttatcctcttccccattttgtaggaaatcacaagtgtcatagagtattcatttgcagaacgttatagatcttatccatgagtagctgatggattatagatctttgattcaattaagttagttattcaagaattttttactgaggctaaaattgcttgagggctgttggacactgaagatagactggaaaaccatacacagcccttgatggaaggcagacacttaaaaatgactatttaaaaagtgacaaattgtccaatggaagtatagaggagaccagggaagtatattttgtctaaataataaatcacagaatatagaatgaattatattcaggcatttagggatatatagtaatatacattttattactctgatagaattttaagctatgctagtgatcaccggggaatttttaataaataagtaatttgcatttagcatagtagctaatttaaaccttggaggagtgtttcattacattctccctcggggttgaactattaataacttatctttagatatccagtaagaagggatgtctgaattaggatatatgttataatccagcacatatgtcaccttcctttactccctgtgttagctacctctgattcaaaatagaataaactagtccatcttgtcataagtctaacagaaagttatatactatccaagactgtatttatgattgttttcatatttcaaataattagaaatgtgaaagctggctcctcaagaaaagacaaattcagtgacatgaaagttgaaactgagatgttttaaatgacatactgatgcttttaagtatttctattttatagtacacacagacaaaatttcatattttttagtgcttactgtttctttagttgcatgtctatttctcatagttaccattaagaaatcttgttcctgattttgtctgaagacaacgaaattaccaggtaatcttttgaaaaggagaataaaaccatatgcttttaaaaagccaatgaaacaatgtgactagctaattttctctaagtgaactccttttagaatcctttagcaaaattctttttttaactttaaaacattaaaggattagaaaatagtctcttatgattccaaatcaccagtagccgaaaatgaggatgttcagaatttaaagtggaaaatagaagcaatcattaataaagaccaagcccacaaaagcctttgctttgcctcaaattcatggccatttcaggtaaaagcattgttttctagattgttttctccagtatgtattttctagtgttgaactgattgcataccttaaacttaaaagcattatgtacttcattttagtacatgtctatgcatgtgaacacaaaatgtctcaaacagccagaaagttttgagaggtgaagagatgtgcatcatttaggcatggtgaaatgctttagtttaagtttatgaaaacttccaaaattttctgcatatttaagcgccttgtatgtattttctcttcatctctacagatcttcataaacaatgaatggcatgattcagtgagtggcaagaaatttcctgtctttaatcctgcaactgaggaggagctctgccaggtagaagaaggagataaggtgagtttctgaacactagtttcattttatgccaggtttcttggttttttgccattctgagctcctgaaccccattgcaagytccaaaagacatgccatgaaaatatggttkctggggcagcttaggaaaattgtctaagttgtccttgttaccaaaaaaaaaaaaaaatgctctgtagttatgtaataatgataaacctgtgcttctgggtgtcatggtgattttttttcacatcattttcctttattttcaattgaaatagtatatagatttattttacagactatataagaagggattgatcataggttataaagtagagaaatcttcagctgggcgctgtggctcacacctgtaatcccagcactttgtgagaccaaggcagttggatcacttgaggtcacgagttcgagaccagcctggccaacatggggaaacaccgtctctactaaaaatacaaaaattagccaggcatggtggcacatgcctctaatcccagctactcaggaggctgaggcaggagaattgctttagcccgtgaggcagaggttgcagtgagccgagatcataccactgcactccagccaaaaaaaaaaagaaaaggaaaaaggagagaaatgctttattcatatgaaattgttctttttatgttgctagataaaactaaaagttattatagaacttttagaacaatatattactaagttattttattaaaaatcactgcattaatattattattcaacacctgtaaaaattatattatagaataacttaaattgactaacaaattacaagcgttgttattttccagctaataatagaaacaacaaaaaccartttttatttagtgaaaattgttctcaagttctaaatgctatcttcatttaaaacttaaagcaaccctatagggcaggtactattttgagtcatttttacaaataatgatgagatggcagagtagaaaggctgagtaatttactcaaggtgacattgctaataagtaataacctcaacattaaaatgctgttcctctgacactataacctgtgcctagtagggctactgcttcactttgtgattattatgaaagtaagatagggttggccgggcgcagtggctctcacctgtaatcccagcactttgggaggccgaggcgggcagatgatctgaggtcaggagtttgagaccarcctgaccaacatggtgaaaccccacctctactaaaaatacaaaaattagctgggcatggtggtgggttcctgtaatcccagctactggggaggctgacgcaggataattgcttgaacccgggggtcagaggttgcagtgagccaagatagtgccattgcactccagcctgggcaacaagagtgaagctccattaaaaaaaaaaaattaaatagtctttcttattatgaaagtaagatatcccagcactttgggaggctgaggcgggcagatcacaaggtcaagagattgagaccattctggccaacatggtgaaacctcgtctctactgaaaatacaaaaattagctgggcatggtggcgcatgcctgtaatttcagctactcgggaggctgaggtaggagaatcacttgaacccgggaggcagagcttgcagtgagccgagatcgcrtcattgcagtccagctgggtgacaagagcgaaactccrtctcaaaaaataaaaaataaaaaattagatagcataatattaaataaactttttattctcctcctgggtgaggagagtaaaaaacttcagaatatttwtctgaacacgtaagtgtttctaagtctaatttgaaatgatttttctgctctttagttgcccaggggttgccaagytttaaatttctgtaaagaagtaatgttttattttattttattattattattattgctgcaggaaaagactactgggaaattaaagtcagcaacacccaaggataatattattcatgacaatgtgttttagttaattatagcgatcacatgttcctgccagtctcctgcccagtcttttccattactttagccccagtaaatgagatcacaaatctcaacgtactgggccatgcagatacttattccaagatagtgacasacctgagggggcccttttagatttaggagaggcccttggttcagatttcagtaygatgaaaacaagtaagaccgaagtctcaagccacaggagtacggagttcaaccataggggttaacaatttgagaagtagaaacaaaataaaatgatgacaaatgtcactggctttcagattcagatttactctttatactgaagagttcaccaaagcataaattctccattctgcttctcactgtctgtgggaaaaagtgcacaaacaaaggtcctttataatattactcaacctttgtttatggcctctttcccaggccaccgcattaacttaagastttcaacttcgtcatgcccagtgtccatccccaacaattgcttgctagtcactgcctctgtacatgtccacagtgtagtcctcaggacctagttcaagtcaccatctatagtaagagcgtagattttcaatgtttgtacttaaccttctttgagattctgttctttttcatgtaaaatgaggagatagaaaatgcttgaggagttaaatatatagagctcttcaacggtgccaggcatatcctaaascttcagtcatgcccgggttttatacttatttaaagccttctctaaccttctcaagcagacttactctcttctgtgtggttataggacattgtatttgcctgtattataacctttgtattatacagctataggttaatttgtctgagacaatatgcttcttgcagagatcaacactgcatctctcatttatatccttggtttctggatatagtatatcctataagtatgctatactatattygatagatatactatactatagatatagtatattctataaatctatgaagtagtcttctttttcatcaagtgttgaatttccatacattccacattcctcaccttaggaatttagtactaacctgactattggctatggcagacattctcaaaatttagcctgtctcagaatgtccaggaaggcttgttaaaacacagatagctgagccccaccttcccctagrtttcactgcaataatcttagaatgggacctgaaaattttcattttttatcaattctttggtaatgctgatgttgttggttgggaaggaggtgagggaatgcatcttgaaccaccgaactaaagtgttaagctgttaagttgtatctcctctcaagcgttaacatttaacaggggtcaaagagttttgacacctaagaaagttagtgattgaaaactgtactgtggtgatcactctgcacctctctgaaatgctaccaaaccaaaattgggcatagaaatactgatcatccctggcaaggtctataggagccccagaagcctgtgccctataagccattcccagaaataagagagaaatttattcttcacctttcaaagaagaatgaacgccttttatcagagacttcaggagatccacacaccaccacctcaaatgttcctctagttgcttgagtggctctagcaggcctgggaaggtgagaaaagcaataaagggcaaggacagagtgagcccttgagagctacatactttctctctccattcaagaggaaggccagatctgtttgcagtttgcaactaacaaacagaaaaatattattgatgttttarttctggagccttgaacatcgacctttgccactgggattaattttattaggaaaacaaatctctatgcccaaagttccagttgaaaccttgtcaggcagtctgaggacttttcttagtgaagtttgtgggatttacctccttcctaaagtatagtaagggaaagctaatgatcatactggaagacttagaaatgtttgccactgatttgctctgtgcttcttgacaattactattgcttacccaagagatcaaggatgctcattaacatctacccaagcttcaaatcaggtcacaatgccaactgagttggctggtcaactggttactaaaactaaaatgttgatggtataaactgttcatggtaaaccagtttgaacatctagcactcttatcatcacattcttttttgaattattttaaaacatatttttaaataattattgctcttcccacaattttgccgacaaatgtatagtaaactccgacattgcttagtgaaaggtacaaatctagtaaattacatagtcacagtaaacctaatatgctgtatctgactctttagataatgagccaagaggttttagggatttaatttgtaagtagaatggggctaacaatgggctatataccgcctttcaacggtattataaagaaaagaggaagggcaagaacaaatggaggttacaaagcaaagtacagatgtgggtgggaactgttttcttttcacttcagtggttcttttaggctatattgactaatcctgaaaactgcttttaatactaaggcatgacctaacaaataattggtggggataaaagtaaatgtccgttaaagtaagtgcctttgacatgtgtaaaagtaaaactggtctgataactattttctccatctctgaatgaatttaatatggaaatgtaccatctgggagtgatggaagagttcagtccttccttaactgtgctttaggaggcatttgatatctcatcatcatttgaactgtctttttacattcagcttgtggcccttacttcaaaaaaaggagcattttcagtgctataagcaaaattgttattgatggtggcaaatctgagttaatgtaccaaattgttttctgtttaattaaaaaattatatccctgaaaattccagttctgaaataaaaatttaaaaaatgctagtcctggaattaagaaaacaataactgttatgtctaacagtttttgaataatgtataagttttgttgtatcatggaatctattaaaatatgatttattatgtaaatgccaatgtagttaaattaattatgtaaggcaccccttatataaaatcagtacaacatgatgagtttataaaacaggtaaccaaattattcaaaatttatttattgcccattgtagacccagaattgtaagaaatattacagtttacaaaacaaatagcagtatatatttgttgcaaaggaggtcattattagggcagccttacagagatgtaagaactagattttgtagtcagatgtgggatcaaaggttgattctactgtctgctagatttcatatccatgagccatagtctattcatttataaaccaaggctcatgatacttaatagtaatagtaactatggggctttaaagaactttccttagtgcctggagcttagtaggctcttagctagtagccatcatcaagctggactagtctggcaaggttttaggtagattgatatttgagctgggtcttaaagtatatataggatttagaaagtaagggagtatactggtataatattctaggcaaggagaactacagacacaaaagtaagaaggagttgggtcagatagagtagaaaaaatgtaaacactaagtttggataggtgagatgtggtctgaaaatcctgggccttgaaaaccagggaggactttgaccttgagattgtagatgaaagggaacaggtgtaaacatttgaaagacaaagtgataagataaaattatttgcagaagattagcctggtgatagtagccaagatagtttgaggagagaagagaatgaacttgagacagcattgacaatatgaaataatagggcctaaaattgttcagagcagtgaaaactgaaaggaaggattaaaatacattagaacttgctaggtgcagcaatacacacctataatccctgtgtgcctgtaatcccaccacgttggaaggcaaaggcagccaggttgcttgaacccaggaattttagaccagctttgacaacatggcaaaaccccatctctacaaaaaaattaggcagacggtggctcatgcctgcaatcatagcacttcggaaggtcaaggtgagaggatcacttgagcccaggggtttgagaccagcctggacaacatagcaagacctcatctttactaaaaataaacaattagatgggcatggtgatgcactcctgtagtcccagctactccagaggctgaggtgggaggatcacctgaggctcgtcaggaggtctaggctttggtgagccatgtttgtgccactgcacaccagcctaggcaacagagtgaatctccctctattgagagagggagaaattgctgagagttatattaaaatttaaagttttaactgctaggacaacagtaacaattgccaccattgaataatacataatgttctaacatagaaaatgtttaaatgttatcttattaatcttcattacaaccctgtgaggtaacataccccaatttcttttttcttttgtcttgctttttctttttttttttttttttttttgttttgagatgagggtcttactctatcacccaggctggagtgcagtggtgcaatctcagctcactgcaacctgcacctctcaggttcaaacgatcctcccacttcagcctcctgggtagctgggactacaggcacacgccaccacaccaagcaacataccttgattttaaagaaaagaaagctgaaccttagagaagtcatgccacaacatatttcatggtttataataatgttttgggatagtgatttgattgtatgtctctcccatttgattgaatattccaaaaggacaatcttcttacttcactctgctgtctttagcggagggatgatgagaatgctgcagagtcgaatatttatcaaacctttagctagagggatgaatggttagatgcctcaaggtttacacagctaatgaagaggaatcagaattcaaatctgggttgttttcatatcaaactatatattaactaacattactgtatttctgcatctgcaagattacatataagatgtgagaaaagggggcgcatgatccaaaggacataatcataagaacatctttatttatagcagcattctttagggatgtgctttccatatgggagagttacttatcttgaagccagttctccgtatccctttgggaggccaagatccctatgatagcccatatttggctaagaccaatagcaggacactgaacagaaagatccaaatgaaagctgtgtcatacagatctgtttaaacacagaccagcatgtattttataagctctggtatccacagatcatgctgacaatctcagatttttgtggtttgctttttctttttttcaaacagtgctctgtaaatttaggaaaaagttagaacgtgtggcatgaaacaatgtctaartataagcaatcaatgtgattaactgaatgccgcaaatatgcactgtatatgtatttctcaggaaaggcaggcaataaatacatatattttgtatatatcatcattctctgaaaagttagacagtgagatatatcagtgtgtgatgtattacactgaaagaatctttgcttgtagtcagtaaatattattacttaatcagaccagattgtgcttctaaaatatctctcttgccccagatcatattattttggtgataaatactagaagaatagtttttttgtattttaattcacagacttgtaagtgtgggtcttcttgattgaatatagcctaaggaggaggatgttaatttgaggtccatttgaggggaagatatctccttagatgggatttagcttaattgtgtacaattttttaaaaaaatctagggtcattactttttstctcccccaattcttaaagggaattgtgtctcctgcaaaatattgcaacctactggcctgtgatatagccactatttgtggagctatacaattccatgtagtggccagttctatgtacaaaagaacactggaatgatatattcctttatggtgtttgcagtagtagtaggtatgttctgtaagagctcagaagaggtctgaacagggatctgcaggggagtggagtggtcagggcaatatttgtaactgaggtgaattgcaaaagaaccagagaatatatctggtgtagaaaaacacaacagagaaagaaattgagtgaaggcactatgagagtgaaggacaggaggctacactgaatgtggagtcactttactctttgacttttacttgaattaatgtagttttaagccatgcatctttaataagaaactgacttctttatcggattagggatttaaaaggatctctttgtacccagttgggaaatgagaggttgtcacatgcacatcctactctattagttccactatttccatgccctgttccctctgcacaagaggaatgagcacatgtttctaaggtttattcttcaacagcaaagcaaagttcttattcacccttcaataggctcttcatgaaagtggacaggctgttgagtcaccagagaccaaggaagatattcattattttggatcttgagcttgacctggaattcctgtaacccagtcactaagaaagtataatgtgtggtaaacagcaaagattctacaatcagatgggctccctttaaaactcagttcagccacttttagttattaaccttgagcaaagctcccgtctctctttgctttagtttyttcatctgtaaaacagggaacatatttgtgccataaaattaatgagaattaaatgagctaataggtataaagtcatcagaacattacttgaaacagggcaagcactcagatgatagcaactattaaaatcataaaacacttatattytaggaaatccagcatgtgctaggtacgtggagctcatcatgtaaagattattcagcaggagtaattccaacatacagtagttgaatgtgcgcaatgtgttagactttgggataatggagacacagtgcctgcttatgaggcactacagtctattttacagggttattggcattaaatttgcttgcctaatatgtttagcttactgaattgaattcctgttgacttacaggaggatgttgacaaggcagtgaaggccgcaagacaggcttttcagattggatcyccgtggcgtactatggatgcttccgagagggggcgactattatacaagttggctgatttaatcgaaagagatcgtctgctgctggcggtgagtattatccaagctggatgggtagctagagctctcaaaagcattcagcgtttgaaatggcaagttgttttgattttagggatcactatatgctctctacaaacaaaatgaaaacattttttgtcccaatgaataggccccttaacattgaackattctcaaatagtaatctgcatttcaattctggatgatgttaatttctgctcccataatagattctacggtctaaactttagcaaacccaagttaaaccaaattttagaaatttctttaccttaaaacttctcagaggtttcaataagatcacatgaagtttgagtctcctagaatgatatrttaggtttattcaagcatttgaccactgagctcttttgatggaaaaactcaagtttgttaagggtgcccaaaatatttctctaaaataaatcttatttctcattagtctagctcgctaagatatttaataaatggctactttttttcttcctgaaatgtgtctgttcacaagggtcataattaaatgatgttctttttacagatgaaagaggcaaaaaataaaaaaaatccaattattaatgtggtttatcaaaatcatgtttttatgaatactatttttgtttgtttatgttttagcagttagatgagtcagagmataatatagttgggggagggtatttccttgtttctgttgtctcaattgggcattatgatgaagccaattwaacataaacmaataccaagatcaggtttcaagcaaatttcatctttagaatctgaaagtggcagtaacaaagaagtctacatttttaaaaaatcaacattagcatgtatggttaatagcaagtatggttaatcaaagraccatttattactcaaatattcaacataatttgaaatacacaaaaattcagaacgagcagctatgtgcaataaaactatagtaataaaaatgacctgtaggaagaaagcagaaaatgctaaaacttggcttttctcaattatctgatttgttgactgcctgtcagcataagatcctatagagagaaaagtacaggcatacaaaagtcacatttggttaaattttgacatgatagagagtgtagtacagaaacaaatagctttaacagttcatcacctgtgcatttctgccaggtaaccaccccagcagaatattagatctcaaagagcttaaggtcctgcttaagaagagaagccaaaggggagataggtcatcttataatggttagggcacatgactagaaaatgttkaactttacctgaccattaaaacggcaattatgacaataatggcaacactggtagtttcctaattaaaattctgctgaaggaaattcatggatgaaaaatccaggcattacttaagtttgtgtgagtagactrtgtatatccagatggaatgtaaaaattaaaaatgattactgagccatcattaatagtcactgacactaagttgtcacccacagttgattacwaaataagagaaaccttgttggaattctgataggacttagaagactaggtttcattctcagatgttatgtgtatatcaaattgtgaccgattcctagaaagctggttagcaggagaacatcaaaatgagatagaaagagcactggggtttagaaatcagaatctcactaccctttgtgcccagatcttgctatttgacctaaaggaagtcattttaactcttaaaaagtggaggttagacaagatgacaagatttcttctawttcaaaaattccctagcacatgattgctgaaaatatttactacatatttttaatctaaaacttatggaattttagatttggtgtttgacatgtttttcagacaatggagtcaatgaatggtggaaaactctattccaatgcatatctgartgatttagcaggctgcatcaaaacattgcgctactgtgcaggttgggctgacaagatccagggccgtacaataccaattggtaagtatctttgagaaaccactaatggtgaggataggagcgaggagtttactatagagctgaataatttcaaactctcccttttaaagatgtcaaccaaataaggcaaaattattttcctcttgactttgagacaacacagttttcaacttagaagttctattaaaattcataaaaggtcttttaaagttgtttcagcataatcatgaagataacattatagatattttagaaaatgtcaaagtaagaacattcctttggcagtaattactgatctgaggcaattgcctctctaaggtcccaaactttttaaagctgacctctgaaattatttatttgggttttattccaatactgacatttatatcctttctgtaatgtaattatttaagcctctttacatgttccagtataagtcagttatggtcatctgtgcctggtcaaactcagtgtagttagaccagactaatcaaacaagccagttcacacggactcgtttcaaatatcttcaaagcaagatgggactgtgtttgcagcctaagttaagggtttgtgtgtgtgaatytgtacgtatgtgttattttagtggggtatgcacataatggagtagaaatactaaagatatttcatgtgaaacatgaaaacacacacatttaggaaacagtatgggtggaatttaattyaggcaaacctatgaactttaggaatacaataccctccaggactggccctgatgtgcacttccaatccaattggagcatgcaggaggtcagaagtgatagcagaaagttgagaggagagtaagacctcggtggtactaagaaatgtggctactttagaactgtcctactttactccgggacaaaatgggagaagtcacttaaaacacaaatagatcttgatgaagagagtycttgctgaaaccaggaagcttctgtgggaactagaacagaattgaatgtaaagcataatgtatctctctggatgaccacattaaacttcggggcacataaattggtcaaatttagattgaaaataaatgtcttatactcctgtcattttcttcatgtatttagagaatttgctattattgtttggtaggcaaataaaatacattttagaacaagtcagtaggaaaggcttattactcatagggagattttctttttaattctactgtttttaattttactatttctaaaaattatattataacttttaaaaagaattctcttattggtagaactttgagctaccagaaacaaattggaatgtggttcttctcttcgccagagacctcctacttcctttctcgtcccttttttataacacttagagaataaagataattttcaaatcaggcctcctagaagatgaaaggtggaattaattatctttcagatttttgccaattttgcctctttgatttcacctaactcaattttatggttcctatcatttcgaattactattttagggcttcacttaccattttgggaatagttggagatatagatggtctcgatctcttgacctcgtgatctgcctgcctcggcctcccaaagtgctgggattacaggcgtgagccaccacacctggccagatatatgtttttaaaattattgtctacacctttctctcacatcaccaaccaccattttgtgaatgtcaaatacatttgtttatatatgattgtgtgtgttttatttttcagatggaaatttttttacatatacaagacatgaacctattggtgtatgtggccaaatcattcctgtaagcttttctcctatataattctcaattttaaaaagaagagttcttattctatctaatgatgaagctktctctaaaacagatggatgnttatgtatttgttaaatgtggagtaaatgtaagatttgttgaacttggtctccctgtgactaaacttcttgcatatgaattaggtagtccraaaacctatctatattctggcatatctcttgagaatgttttaatactacatcatccataaatgttaaccctttactctatgggttgttttattaaaagttgtattatgtactctttataagagccaagctttacatgtatatggcaaggtgctctccactgcacatctgcaggatagcattttggtggaatgtagtggggcctactattctccaacgcactttctcattgagacatctcatcatgcagaacagtagctcccagagtgttcaactcatgacacacattttttaatcaaaatggaaaaaagaataccagaggcatttgaagcactgcatggaatatattttacctttagataagaggctcagatcctccatattactcttagaggaaagtagcctttttaagaggattgtgaagattttttaagcccaacaaacaggacactatctaaatgattttattttaactgacatgctttaaaaggccaaacaaaaaaatggtagcgaagtccttatgtgaagaaatggtcaagacttatctttggctccaatgagattgaaatatattcatatcaatattttagtgaaattgcttattaattcaaaagtcccaataaatygataaaaactatataattatgaacactgataatagctgatatgtactacttgtctatgctagaccagtcattgtgttgagcccctggccctctttcttggttaatgctcaagacagccttctgaggcagagaggactattatcagcactcacagattatgaaatcagatacagagagcacgtaacctgtgtgagttcacatggctggtcagtgattgagctgagatttgaacccaagtacttggcctctggaccctggacatctttgtctttagcaaggtatttttcctggaaataaaagctactaaataatattattgggtaaataattacaataaatgacttatggagaaggagagtaatcatcctttttaaacatttttagataacttacagtgtgctccataataagccaaaccatgcagtgattttttttttcctggtagaaaaagaactcaacagtacttgattaaattttgaggttctctcctatttccttctcatatctcatatctggtttattcagagcgttttagcatttactagttgcttttagcaatgaagtataatatgccagatgatttcacaaaactacgcaattattacataacatctacagggggtgtataatatggaagttggattagcaaatatgycttttgcaatacaaagaatctattgttacatattgctttctagtggaatttcccgttggttatgctcatttggaagatagggcctgcactgagctgtggaaacacagtggttgtcaaaccagcagagcaaactcctctcactgctctccacgtggcatctttaataaaagaggtaagtctcccgaaatcaaaatatgctcaagaactcaagaatcctaaattacaataggaagacctcatttgttgctactataaagtacattatttacagatggctcctgtccagtggggggaatacatttagcatgacggctggctgcaatttctggcagtcaccccaaattcatctctgcccaaatgcagacaggaagccaaacacaaaggyttggtgtcaaacagtcaacttgggatcacatttttgcttctttgtccaactctcatgaacataaattcatgttgaaattaatgtagcattctttcaaatgttgaaacattaagttggtttgtacctgccactgatggcctagtgttttctgcaaaattgtgtaaactaatctatgtaaggttgaaagggcctctatgccaatatgcttgtttgtaatattgggccacattatttccaaacacttttcaatctactcatgagtggatatgtttatattcagttttctattatgagttcctctgcatttatcttcctgttcaaaaacagtaaaagaacatgtaaaacattttcatcagctatctagattgtgttaatatacttgcaaacaattcattgtccttttttcttcatcttaccaaatcttaaaaaataaatgttaatcactagaaacttaaagttacaaaactgaacttatcttttaaagatattatttattgaaattaaaaacagggaaaagagatgtcaaaatgaaacatttcgatgcaaataacatgaaattgtaatgtgcccaactcagttcccatgccttcacctgaattctttaatgaagattgaaatcaacctgtgatgttgaatcatgaatgggatgacagtatttacttaacaatttactaagtaatgccaatgggaatttgcaactcagcagttatgccctcaacaatcaacaacagctaggaactaaaaaatgttagatcccttcagcttcttatttttgctgatgggaataataaacatgttacttactttctacataagtaacttaccaaacacttttttacatacaatctttttgagttagcattatgaaatttgaaagagccatcactggagcaatgattcatagagtatggacttaccctgacaagaaattgtcctttaataatgcaacccttgaagttattctcttatgtgtgcttagaaatgacataataagactaaagaatagagccagttgggtgaattatttttttctagagcatctcataaggttggcattaagagacaatctcaatcccctactctcctcctttttgaattaaattcttataytgtaacttttaaactttttatcttttaggcagggtttcctcctggagtagtgaatattgttcctggttatgggcctacagcaggggcagccatttcttctcacatggatatagacaaagtagccttcacaggatcaacagaggtaatattatttactcagggcaaaagttaagaatgtctgcattgccagctatgaagtatgttttatgtaactatttttgagccaayaattttaaarcaaaaactctttttaatgatttgttacttattttagccttcaaacatatggatagaatataagcagatgtagtttgaatgacatgatgcacctattttaaatcagaatgagagtaaactatttttagtatgttcattactttctctgacgagaaatatggctgctgagaccttgtcatattattaggaagatttataatagaaaattaggccatagtgatttgtatgaatgaatatgattttatcctataggttatgaaaattaaatagtagagtctcaccctttgcaccttatttggggttgtctttctcctggacactgtgaaagagagccagaaactcagcttccctcagtggtacctagactaacttttctgcctctctggcttgaacttgaccatcctaaaggttaaagaaaaagaccccaaccacaaaggagaagtggcgggcaggagggagagcagactagaaggtgaagtttgggaaaatagatccccatttattgatgatgttctatcctaagcaaaagaaagtggtggaagcatactgtaccatgcaaaaaaaattattgagtcattctattaaattacgtgactttgttagatgctcagtgcaaaaatgttattcattggtacacagtatagacagtgaagagtgagcttcactccatcttagaaagctgctgacaacaagagaccaggcagggtgtgataaggtactaaggcatgtacaaaatgctgtaaaaaaggttcacaagaaggaatgatgatgtccaaatgggtactagaactagctctgggttttgaggaattgttacttttttaacttcctggaagttgagaagcaaaaaagacattccagatagtgtggtgagcataatttgattattttataatcttaattatttactccagaataaaggcaaatttacatagcaaaaagaaatggtggaaaatcaaactttatttttcttggtctttttaaaatgaagtaaataaatatatatatgtcttctttgtttttcacagacgtagagtaaaaaaagtttgcattctgcaactccctaattgagatagggaaaagcaaaccccacagtcaagatttattgtagacagaacaagtgggaatgttcaagatatggcaatacatttaaaaatggtgacaccacaggttgaaatcataccagaggaataaaggtgaaaattcctcagcctagaattctagaccctccccaatagggaatccatgtrcctgttgaggtctgtccaacccatggccagggatggctttgaatgtagcccgacacatttttttttcattctcatcagctatctttactgttagtgtattttttgtgtggcccaagacaattcttcttcccatgtagcccagggaagccaaaagattgaacaaccctggtctagatcctatgcctactccttctccaggtcatctggaccaggagctactgtttgctgatctcatcttcagcatcagtttgtcttcgctcatccatgatcccctataacattgggggagcaytttacctacttaaaaaaatccctggagattaaaagtctagaaaatatcttggtttaaattctgactctacccctcctagcagtgtgtctttaaaaagttaagtagccttactaaatttgagtttcttcatttgtaaaatggagatgagatcaaatttactgagttgtacagaatacaattaaatgagctaatgagtagtaaaacatttatcaccctactgagcgctcagtacatgccatatttcctctttcctcccatactttttaatttcgcacactagtttacacaatgtgagaaaaaagcttcctgtcccaatatttctttttctccatctctgccactctgccccatctcttcctgattattccatgtatcttttcattcccccaggcttttagttcatccttggccataacctactctaaacttgctcccacacgttccctctctggctttctccttgcctctacagtcccaggagcagagcagcctaaattttaaaacaccccatctgagttcccattgtccaccacatataataacagtgcatgcctattgccttatgtgtctctctctcttgctgattatcctcaaagacagtcttattcattgttatctccagaaaccatcacagtaagaaattctaaataagtattaaagaattaaatgtgatatcacactctggggactgtggtggggtcgggggaggggggagggatagcattgggagatatacctaatgctagatgacacattagtgggtgcagcgcaccagcatggcacatgtatacatatgtaactaacctgcacaatgtgcacatgtaccctaaaacttagagtataattaaaaaaaaaaaaatgaaaaaaaaaaaaaaaaagaattaaatgtgaataacacgattttaggagccacaaaacccatcctactttcaactcctgaaacttagttccatactccctggaacttctttctggattttcttttagcttcacatttgttgcttggcagatattaaggaacttgataaatgtcatgaaagaggcaaacaatagactgtatcctttgtgttcattgtagcaaagaccctccattctaacaacactttaggcaaggtaagaatttttttttttttttttttttgagaggagtcgtgcactgtcacccaggctggagtgcagtggcgtgatcttggctcaagctccacctccgtggttcatgccattctcctgcctcagcctcccgagtagctgggactacaggcgcccaccaccacgcccagctaattttttgtacttttagtagagttggggtttcaccgtgttagccaggatggtctcgatctcttgacctcatgatctgcccgcctcagcctcccagagtgctgggattacaggcgtgagccaccgcaatatcccattagattcatataaaatagaactctacccacattatgcaagacataataagctagaccattttcatgggcatttgctacttctgctccacatggcaatgccacagtatcatggaatacactgtttagccatagtcttaatagttcttatcttttcttcattgcatactcctttgagaaaaatgataaacgtttacttttctccaaataagggaatgaaatcatgagacaaaaattaatgtctctttgttttgactttagctagacttttgggaaaactcaagccttttatttgccatctaaacttgtgctaagcaaaagtgtagactttctttctcattcatacttctaaccattcttcatcctagttcttttgacgtttgtagcttttacaaaaatatatttgattttattaccttctccaaggcaaaagttatctactttaatggagttacttccgtaaacctaaattaaacaaataaaaaaaattcagaaagaatttagagaaatcaaagggtgacaggtaagtaaattttttatctacaaaattaaaaactccttaacatcttaaatgaaaattcagtttctgaaagtggtcataagaagtgtgttatagaatggcatataagagaaatttcagacaggatttccctagtgcaaatctccttttaatttattttttattaatcttttaggggtttgatttagaaacataaaatatttaaataggaggaaaacattagcatattaatgccctattctgtaattcacagtagcagttagttcagtaaccacataaaatctaaacatacactcacgaaacatctatttctctcttgttcagttgggatagaaactttttattaaaatctgacatgcagagtaaaaaaaagaaacctagaaaataaaagaagcaaaatagtgaattgcctttaaaaaagaaaggcaaagaacatgttggtggattaaggctgccatacaaataataaaaaagaaataattgtagaaccagccaagtttttagagatagaaaaaccagaaacaactatagtaaataatcttgatgggaagtgatccacaaaggaaaaaataattgaaaacaaagtcttcctctgaaaagggmaaactagcattaaagaagaaaccagaactgtaggattccagctaactgaagtagctgcacagatcccatttctttcatccagttccactgttcaaaggtgtgtgtgttgggtgggaagacagagaaagaaagagatagagagacgactgtcaatccgcaattaaatgagccttctgtcatagatactaatgaggagaggtatgcagtgatacgttattgttactgctaccacagagttaacaatctatttgggaaatgtatttctatacaaataatacaatctggatcagactctgaaggagacttcatgaggttttttgggagactagaaaaagaaatggtcctgtcatttcttctagcatctgacctagtgtcatcagagaaggatttaaggagaagctaagatatgagctggacccctaagaaaaatagaacttgaaggcagtccaggttggggtggacaaataatgagaagaaggatgagattcaagaggtagygaatatgtcagtttgactggatagagttatctggatgccagaagagggataaaaaatgaaatagctaagttgcgactgggtcatgataagtctgatcaatctgtagaaagatgatattctgattaaaattaaaaataacctccgtagccatcaatatcacttatccgtgttctatatctctgctttcttgctgatgaaaaatcagcatttttctgattccttttatgtctgtatgcttggatgagggagctttacatatctaaaagtgccagatctttaaaaatgccatttgccagagaatcacttgaacccgggaggcggaggttgcagtgagccgagattgcgccactgcactccagcccagtcgacagtgtgagacttcgtctcaaaaaaaaaagccatttggtgtttctcccaaatgaaattttactgtggcacaaacatcacataaatttagaatgctaaagcaacctgtgttcatgagagcagggtaascctcctcctttgtaatgctccctttcaggttggcaagttgatcaaagaagctgccgggaaaagcaatctgaagagggtgaccctggagcttggaggaaagagcccttgcattgtgttagctgatgccgactgtgagtagaaaycactttgttaacttttcgtccttcatcgtttttggtgtctgataatgccaaaagtgaacttgaactttacaaaaaaaaaaaaaaaaaaaaaagcatttgcttctaacatcaaagtgtaaagagtccaaaattactcttgaaaatctcttaaatcatcctaaagttataacacatagataatagacacaatttcttcctcgtttagaatagattgctatttcctcagctgaaccctagatgatgtaaacattttgcatttaaatgccatggtgtattttttaaattccatatctgtgaytattagcatttcattgagctaatgagatactccagaatgggacttggattgagaccaactgaggagacagcagtttcacatttgccctctcccttcactctgggtcatacactcattaaatgaaatgatcagaagaaaattatacctaatatttaaatattttttcctagcaagtatagtggagtttatgtacattaaacctacaaatttgatataaccccactatataatattttaggttcattctgattatattaccaagtagaatttcccaattatttcctaaatagaagttaattagcagaaatgcatggtcaaacattcttttttctttcacaactgcattatctgttagaggctgtaaatacaaatggttcatggaattagcctatgttgctgttttgatcttaattgaagtattttagaacacactaccttatgaaatattctataaacatgaaagatttctaattttactaagactgtctataaactgcttctgctacaacttaagcagatgtaattagttcacaaaataaataataatcatacccagttgctataacattgaattgaatcttcagcatttagaaaattaaaatgcaaagaaaattttattcttgtttagagtctactaaggaagcaacctatttcttccttttaatgcacattttatcrcctaaaataaataagagtttataggcacatatgaaataatayggtatactttagatagattttgaaaatgtctttgatggaataaaatcataaggtgagtgagtgattctgagtattagtgttttttgttactttttagttgtttttgttttattttgtttttctttcccacaaagatcacatttcctgttgagtagagtatttaagaatcttttgaaattatttaattcgatagacatgtcaggttttttttattatctgtttaaaatctggggcctgaaagaaataatcacaatcatctaattatataattggagatatttatataaatcatttccaaagagatttggtctcatgatcaaatctacattcttggtgatgtccatattaaagttgtaatagtaaccactattttttcagattctgtatgtttctattttttccatggtaaatgcaggatcagaaagattaatttgccacctggctggtaggaggtaaactatactgagcccatgtctgactacacaactcataatttttctttatctccatgttgcctctgagaaacatataaaatatataatttttataaaatatatctttaatgtgaatgtcttcttcgcagtggacaatgctgttgaatttgcacaccatggggtattctaccaccagggccagtgttgtatagccgcatccaggatttttgtggaagaatcaatttatgatgagtttgttcgaaggagtgttgagcgggctaagaagtatatccttggaaatcctctgaccccaggagtcactcaaggccctcaggtaagtataaaatagaaaggatagcattttcagggcacaggaataaagtatcctctttagacctagattttattgagtaagattacttcccatctgcacaccttcctaggtgacaatgctgtgccagtttggtgtttaaaagcaatctaactcccagtgagaatgaaatcatcctgtttttgtgttgcccagttttcatgtctagaaacagtttaccggccatgctgagaattaaagacatgaggaaaaataacaaatgttctacatttttggctttcctcaatctgcacacctcttgattcctatatacagttctctgtccactttgaaattcttatacattcctaccattttttcctcctgaatccttcatctccacagccatcccacagttataaccagcactcccctaaatcctctgcaagtcatcggttactctgaccccctaatcgtagcatggggtcmtaaaatgtcctgagtttcctttgcggcaaacttcgtatttcagttgttaaagcccaattattcccctaggcactcagttttctttgtagactttattatcagtaaaggtctctctctctcttatccaaagatcatctttccctcttccttgcatagttctctgttcattgtttgtttaagcttctggatctttggttgtgaatttcttcctgccctttgggtcttgttctagagcagtgattctaaactggggcaattttgctcccctcaccccggggacatttggcaatgtctagggatattttaagttgtcactaccttggtgagaagcggtggctctacaggcatctagtgagtagaggccagagatgctgctaaacatcttgcagtgaccaggacagccccatgacaaagaattatctggcccaaaatgccaacaggacaactgcsgagaaatcctgctctggagtctagacattaagcttagaggctctgttctttcacaataaaggttttacactgatgcgtgctgtcaatttgaaaccaaacgctattcttgactcattcactaagccaaaagtaaattcarttaactaaaagttagtgaacgttgctatcagctaaaacttgagatgggtacctggcaatgccaaaaagaacaaagaggacttgatcccggacctcatggagtttacagtccaagtaagttggacagtcttggattttcctgttcatctcaagacatccaagtaggaaaatcttaggacttaggcagtgtaacatattgaaatctaaaggccctaaaataagcggcaastgaggtaatactttgttttatcttaatcccattatattttgtatttgtctttgagtttaatgagtacttaaaagtagttgccctttttttcatatttggtatatggatgccaagagatatattcaaatcagttttgacttggtctcccatttcaaaaaagaatggaattctatgttttttgttgtgattatttatctatctaactaaaagtgaagcacttttcttattttgttgatggattgatggatgattgattgatagatctgaagagaggagagaatacctaagatacctaatgcctaattgttgggcagtactttcctccattaggacatcttcacaattcaaccaaagactcaaaaattgagctggaatacctcattgattttaagataaggaagttaaaatagacttaaaaattcctatttgtaagattctaaagtaaataatccagtgatctagaatttagtttctataaatgaatagaatccagtgatctgattaatataagaatttagtttctataagtgaatagatttttatcacaagttccattgagtcagtaggataagtaggtatgttagaatttggagaaacaaaagactaaaaagccctgggctcctttaccattaaatattcatctattgttaggagaaaaaacttacrcaaaggggatactcactcactaagctttagcctattgcctcatccaggggtggttgagtgaactgaggcttttaaatacaatgatggaatcttcctcattaaatataacatcaaaaaggttatagaaaaaataatggtcaaaacgatttgttttaggggaaaaaattaaagtttaaaaaaatttgaacattacaaattatttgggggttagagcaattacaaaatatatatatatatactttgcatatttgtattatatctgtggattcatgtgtgtatctttttcatatttcaagtgattttcctatttgactttatagaaaaaatatatattgtcttaaacttggaaaaattagtattttcatttgaaacagaaattgtgatagccacataaacgatactaaaattatcacagagtagcaccttataatagtgtggaaagatggactttggagttacagttatataggatttaaactggatttaaaatccagcctccctgaaactattgtcttatgtgtagaatgtgcatagaaacctcaatcttgaagaataattctgcagtgcaattggataatctataaaatgtatccatcagagtgcttggtccacatgctcaaatgtctagtaaataaataaaaattacatgcttccatttatacccatggtgacaattatcatacagatcaattacttctatatctattcattgcttttgttgatacatggtttctgaataatttgagaacatgtaagtgctttttcccaattcatcttctttaacccattaagcctaaggaatcaaagaatttacccattcaaacaccttaaaatgtttcctttgagactgttaccatatcatgacctacctaatacatttcatagactagcccataggccaatggcccatcacatgaaagagccccagctacatcctagcattattggacagtcccaggtgtccagaaagaaggtcaagtttatatatggtcagcctgatgccttctgaagaaggtctgtatttgtggtgaatcaaaattagccagacaaaactgaccagtctctaagtagagcctaattttttgtttgtagtcccaagctccaccacagtgttcctcaatctttccygtgcccggggattcagtagatctgaggtggggtcaaagaagcacatttggctaccaagtgatgccacaactgctggttgtaggaccacattgtcggtagcaaggcactgaaatacaaaggcctgtagttttataagttagcgaccatctaagttttccaacaaataaggcttttcagcccttttctccagtatgtatgcagggatttgattggcactggttattcaacgtggtcacagacaggaaaacatgacttgggaaatacatcttgaaataaaaaccagatatcatgatgttgagggcatagtcagattaatatgttccaataagacagaaagctttatgtggagtgacatggacccttgactatttattgagaaactagaataccttacccaggcagaatttatctcaccccaccccttagtctgctactattcaacctatgtagtaatttaaatatttcttcttaacactatttttttcttaatctgctggaaatgaaggaatattttccttctgggatattatattaaatattgcactaaagactgttgagcaacattgtaccaaatattgtgccaaattttagaaaatagtttctagtttcaaatagtgcttaatctagttagatatgggggctgagctgtattcagttagaaataactttatggaagctttttcttggctttggaagataaagaagatttgcagagtcagagaagagtaagagaaagtgaaacataaaacttttcaagtagtgggaagttaaacctacaagagcttccaccctccaacccatcttagctcctagatctcctgtttttcctttaatccttaacccctgctacacctgagataggcagccctcaccggttacttggaatccaagagtcacccagttattcaatgtcacaaaatagaaattgagacaaaaattagccccagatttcagtgcttgaagaggtacgtgttcctggtgttcacaaccagaactccaaactcatttattttccttataaaaatagtgtttaaataaagacgatttaagttctgtaatacttggcacatagttagatgtggctcatttaatgaagcaggatggtgacattcaggacaggccagaaattggaagcagatttactgactgccccagtgggaccagaactgggaagggtgcgcagactatggtcagaatgggatatccaagggcatcggacaggtcagagtgggtgattcagaaatggggagatcaaacagaggctcgggagtcttctaagaacagtcttaaagcatctgcttcccaacagatctaattaaactcagtatcaaagttctgtttttctcttttccctcctttcatttcagccgggacaatagtttccaggtaaatgtatttagattaacaggcatttcttccagagtgaataaatgatgattgtcatttatgtgttttttatgtgtttgcagtgctgaatgctttcctatataactataaaacaaatgttaaatacaaatatctgtcttcaagagattttcccctaaaagtcatgagaagaaaatatatccaaagaatgaatctgaacctctgttagctgtttcgattcaatatttggtttaattgcaatattttagcattttgaagcccttgttaacaggcccagcaatgtgttatctttacaagtgactactttttttcttttcatgtgatatttttcaaatagattgacaaggaacaatatgataaaatacttgacctcattgagagtgggaagaaagaaggggccaaactggaatgtggaggaggcccgtgggggaataaaggctactttgtccagcccacagtgttctctaatgttacagatgagatgcgcattgccaaagaggaggtaaatgkcttcattctgttctgttctttttgttgccatgttttgtctgtttgtgtgtatacaaagtgtcactttaaaattcccagctctttggaacatctttccctctaaaccttactctttattctgttcttgatagaggtttaagttatttgtgatagatactaaaaagtagtaagggatccatggggccagccacaaatgttcagccaacacagatctggatgcttaacaattttcaggtgctgccttcacagctttaaaacaatggaaaagaatcctgtcatttgcagcaacaacctggaaaatttatgctccatgaaatatgacaggcataaaaagacaaataccgcaggrtctcacttttatgtgggatctcaaagagtagaactcatagaagcagagattggaatggtggttaccaggggcttgggggagtggaggatgagggttgggaaatgttggtcaaaggattcaaactttcaattaggaggagtaagttcaagagagctatcgtaaatatcctgactgtaattaataacaatgtattgtatacttgaatattgctaagagagtcaattttaagtgttctcaccacaaaagagataaatatataggttctactttctggttccacctttgccctatagactctttctatataacagccatccatgtatttgaaaacagcattcatcccctctatcactccctaccttctatgtgctcttagtcctatttgtttcagctgttagacttcctgattttgtatattgcagttaagtgtttggtgagtgtatatatgtgtgtctgtatacatatataatgtgtatatacattatatatatgctcaccaagtatttaactacaatatacaaaattagaaaaaaaatgagctgtcattcttgcatatcttgattaataccagataagacgtggaaaaaaatcttcaattaaggaaacatttattgtgttcctataatatattaatatayagtagaacagctagcttgctacttcaaagtaggagcctggagctatgtgctgtgttcaattaaaattatgtaaaatatgaacacatttattagagtagctgctgtgtatatggttcctatgttcaaataggattagatttataacgttaagattcacactcaacctctattgaacagcagcccctcccttctaacatttaaatcagtggtgaacaccagaaaactctttgtcatttctgatttttgtcttccttcattcagatttcccagaaaattctggtaatttcaggaatctttatctgatcttaataaatattttattgaaatgcaggagcttaattttaaagagaaaatccagttgtctttcttttacctgaggctgagatacagggtgaattgagtttgggctgcagtaaccaggaacttagtgaaagcaaaagagtactttacgttagaataagcaaattgtgatttttgttttctgtcctgcaattatagccattaccaatgaactcatgctttgattagaataggatggtttagaatgtataagctcttgcagtaaggaacaattctgtttgatatatttaagttgcctaagattttgctacagagtagactaaaagttcgtgatgtttacctaacttggctaattatgaaaagtaattagtaactattctactgagtacagtagaatagttaatattttaccaatggcatacaggtatttaaagcattattattatcaatcattgcctattcatttatccagcagattatcattgcctattcatttatccagtagattgctttctgggacttgttactatgtgtagtgacttggaagataagaaaaactagagagtgaatttaaaatattcccaagtgaaaaagaaattctgaagttaatgatttgttgcacaatcataagttcttgaaagcttaattccaacatctagaaacttaatattgccttaattatttgtaccctttcttcttccaaaggaaatttaacacctgaccattatctgttttcacctaccatttttgcagttacctatttggattctcacacataggtttgagatgagaagnaaaatcttaatcaatttaggatagcgtgtaggaaaaaaaatctacgatatcatttaaaatatttcattttaacctattatttttacttatttrtttcttgtggtatagatttttggaccrgtgcagcaaatcatgaagtttaaatctttagatgacgtgatcaaaagagcaaacaatactttctatggcttatcagcaggagtgtttaccaaagacattgataaagccataacaatctcctctgmtctgcaggcaggaacagtgtggtaagtccaacctaaggaatgtagccttttcagtaataaccacattaacagattactaccttgaactttttcagacttggatttttcatttggaattacctatccttctagaaaagcagttgctgccttgaaaaacaaacaaaaggctgggtgcggtggctcatgcctgtaatcccagcactttgggaggctgaggtgggtggatcagctgactgaggtcaggagtttgagaccagcctggccaacatggtgaaacgccatgtctactaaaaatacaaaaattagatgrgtgtgatgcctgtaatcccagctacatggaggatgaggcaggagaattgcttgagcctgggaggcggaggttgcagtgagccgagatcatgccattgcactctagcctcagcaacaagagcaaaactccgtctcaaaaaaaaaaaaaaaaaaaaaagctgtattggaagaactttagggaggatattttctttaactttatctagcttcttgaaattgcttaccaaaaatattgtattgatgtttgattaatacaatataagaattgccaagtaatttctgagcacgtggtactatgctgtatacagggaggtaaaagagtaagaacaatatttacttggtacccttgtgtatgcaratattcttatatcrgccttcttactctaggattattagagataattgaagttatttttgaaagattgaattttgaagataccctccctctcccatttttgacctagtttatatctcttatttttatactttaatcaagaggatataaacatgaagtctgtgcctctcaaactgttgcattctgtactcagctgtcagtctctagactatgtctttggtcactttggtcccattagcctaattttggcccctcagtcctggaaaaagcacaagattattttccttcccaacactaagtcacacctagatcagacctatgcaatattctctttctttctttctttctttctttctttctttctttctttctttctttctttctttctttctttctttctttcttctttcttttctttctttctttctttctttctttctttctttctttcgtctctctctctctctttctctttctctcttttcttttctttcttcttttyttttttttttttttttttttggagctggagtctcactctgtcacccaggctggagtgcaatggtgcgatcttggatcactgcaacctctgcctcctgggttcaagtgattctcctgcctcagcctcccaactagctgggactacaggcatgtaccaccaagcccagctaatctttgtattttgtttttttctttttttagtagagacagggtttcaccatgttggccggactggtctcgaactcctgacctcaagtgatccatccgccttggcctcccaaggtgctgggattacaggcctgagccaccrtgctggcctggacctatacaatattctaaggctgtggttctcagccctggctgttcattagaatcatctcgggggctttaaaaatgtataaactgatttggggcaggggagggtatacattaacacaaattatatcagtgyatagtttaaatttctcctccaaagcccatgtggcaatttaaatgccattgtaacagcaataggaagtgggcctaatgggagactcttaaataaaattcagcaagttcttcttgaatagtcggtatagctagtgatgaatatagaatttgcctatgataaaagcattaataaaattcagcatagttactgtgtgtatgtatattatcgccacttactgaagatatttataccaagtactacaacaagaatactattcacgcaatcttacgcataccttgaaacaatcctattaaatattatcatccccactttacacatgaggaaacgcttgcagaagacagataacattttgaactcaaagtttttgccaagtgaacatttctcagttccctgttaattcacagtaaaatagtttcatttctagttgacagtaaaatgagcaaatttactctctgcactttttaacaaagacaaatttcagttttgtattttcgactagcagaatgttccatgcttgtttgatgaagcttgttatgacatcaccccactgagggtcttgggaatccctgatcaggaatttcctctattatgaaaaacagaggggaccatcttgttactacatatcctagaagataataattttctggcattgtcccagacctaatagctgcttggtgttttcaggaaaattattgaactccagagttgcaggaagtttactcataatttcaaagtagtatttgattttgcaatttaaagggcaattaaacaaagctgagacaatactgccttttgtaagtgtaaatttattaaaggaattatccctccaggatgagagacatagttaagaactttatggtccagtgagaatgtggaacttcgggaactgggatagtgttttaacaaagaaaacatctgaatattatctcaggataaaagtaatgaccaaaccttcaaagtataatacaatttatctggaagccaccctggttttttgtttgtttgtttggttggttttctaaatttgttttgtagaggcaagggtttgctatgttgcccaggctggtctcaaactcttgggctcaagtgatcctcctgcctcagtctccagctactaacccaggctctggaagccacatttttgtccacttattaaaatagcatgaagggagagaaaagtataaacataaatctcctttaaaaagtgtttttctcttgcrtataatgagaatcaggtaaataattagattttgctaacttttggccaccagcaaatttaaagctaaacaaattgtttatggtctgcaaaactgcattctaattttccccatctagatcttctattgtaattttttgttggattctaattactactattcatgtaattatgtttgtttatataagcatctttaaacactttatgaaatatgacagggaataaattataattaaacccaactcctgccaaggcctctgtttaagcaatttatttaaccaattaatgggaaaaaaaattaactgagtaatatgatacatattacaattgcaaaagaaaattgattctagcctgttaagtacagaaacatcaagagaattacaagctgatccatatataagcagtaatgaatactgatccaacaaattctagcttctagcaaaccatatctttccccctacagcatagtgactattctatcttttataaattcagactaccacttctcagggacacaatgtacgaccaaaatggctatccatatatatagttgcactattctatttgtttctaggtagtgtgtatccatatatgtctgcattctaatttatagtgctacttttttttatcaagatgagtatgttayaatgaaattaatggagtttgtaaggagctttccaaatttctaaaactgccaaaaaggatttttttttcacaccttaagtattgtctataatgcacttttcttttccttcagggtgaattgctatggcgtggtaagtgcccagtgcccctttggtggattcaagatgtctggaaatggaagagaactgtaagattaacgttctmttaagataaatatttatttttatgaaaatgattttcattcccagggaattaactcatagttttcaccttacataaaacctgcctctgttctttcctggagattcatagcaccaaatagcttattaaatgtgggatgtactccataagtgcaaaaggtgattgcagaacagcaacataatttactaaattcctactatattttagggactatattaagcaacttacattggtgattgtaatactgcttgcttttagaattgcttgctatatatatgaatgtaatccatttgggaaacatttccagaaaagaggtggaaactatgcattggtgattgcaagaaaggtgcaaatgtaaacactctagttatttgaataaaccatttaaataagtaaattaggtgacttatgtaaaggaaatttcagtgtaagaggaatgattcccatttgttgagatattattgatgtagactttaacattttttattaccataagaagttatttttagtattaaaacttaaacctaaaaggaaatttgaggaaaacatgttttatagtagtgactagattaagaatatttatatataaatgcatttatgaaatttcaattgcttttgaaactagggtatatagactttttaagtatgcacatatatatgtaaatacagaaagtagtggcaatatgcttagttgattttgtttaggcaagtttagtcattttatttcttaaaacttttttacatgtattaatgtaaacatttatgaagaaaaaagaaatagaaaccttatagtatcaaacacagatcgtaaacttgctcattttgtaattaggaagtgaaaatgtgcctttctcaatctctaaatgtattaaatggttgagtacygtactctaacaaatcagcaaaattacaaggaaacaaatatctctgaagagtcagtgaaatgggagaattataaaatgaccagtctactttctcaatatgctttcatttattaagcacttgctatgtgtaaggtcctaggaaccccagagacatgacaccatgttccatgctctacatagctgtggtggcaggacatgcaaaataacctacatacactatgaaataagtagtaatacactgggattccatatcctatggaggtagagaagcaattaaagtaccgagcaaagtattgaagaaaacctagacactaccagagtataagagtcaggatggcatctctctaaccatcactattttcatctgtcagacaaggccaaggattgtgagtgtggataagagtggaagaagaaaatagatcttttaacctctattccatgcttaagattctatagttctgaccccactggaaatccagtggttgaaaacttaatggcagtttatagagaagaaaacttctcctaacagaagagatgaaacttcctctagggcagaaagcaagtgtaggatatcagttagtagagaagagggctttcttgcatgraacattacatgtggtatgttgaggggctagtgaattttgttgattggtgtggatttatggggatgaaaaatatgatttcagagtaacatatgatacagattaagaagtcctgcatttaasaaatttgacttagattttattagtggagtagtgaaaagccatggatatatttaggatgttgctgaagtagaacaaaaagttagcccatcaaaaatgcatggcgtagctgagaaaacattactggagtctgaccagctgaatttgattcctaattctgccacttgctagccatgcaccccagttcaagctacctaacttctgagcctctactttctcatatttggtggagatgttcacattcctcttaagatggaatgagagttcttgtgggagttaaatgacatactgaatattaaatccctagccacataactgtcacaaagtgtaaattcaacaaatgggtttcttccttccctagtttcttctctttctattactggagaatctcttggcaaaactaattactttgtacaaaaagtaagaacaaaggttagattactctgaagggcagttggttcgtttctggcctggttatctaacaacacatttcactgagaacattaaagataaaataatcaaaaggaatgcaagactaaagtagaccaaacatgtcaatttcgttgaacataatttggtcagactttaaggtgaaggcataaagaaatcaaataagagaaggactgaaaacaggaatcaaccatcagtaatttcctaaaaatctagaacatgagtatagataatttctttcaaatacaaaggaaaaagttgtgggtttttttttttttacttcaaaaattcaactagagaatgctacagttaaagtgtacctgaaaccaaatttggtgaatttaataaccaagtcatttgctgcaagatgttccaagagttacaagttattactcaggcgataacctcaaatgactcccaagagttaaattataaattttcctcaacaatagagagaattgatcagttgagaacagagtcctcaaagagcgaaaaatggtgttatgcagaccccagtgtgtttgaaggtgatacagagtatgcaaatcttgattttgcatctctgatcatagtgttggctctgggattagttaaaagacagaaattcctccctttgtgtaactgtactgtttcacttaggttaacgtaggtcctttaagactttgctagtatgccattttaaacttgattggctcttagcccctcccaccatatttttttcctcctgtcccatagaaaagggagcaaggaagtgtaaactaatggtcgtatagtgagaacacaaatgaattttttttcttgatatttaccaagtgtgttcagcaaacagttcttctgtgcctacttaattagtgccagtcttaatcctgggtacagagaggaaatcagatgtaatgtggtactagtgccttttttttttttacagtgtggaccctggacaagaagcataggttgatatcacttgcaagtttattaccaatgccaactcaggcttcactcgagacctgctaattcagaatcagtatttgaataaggtcccaggtgatttgtacattgaagattttagaagtatacaaacagtaactcacagacatagtaagatgaagagaaatccaaacagatgtttggggctatgtcgtagatatagtataggcataggaatcctaaggagcaggacatatttcagcctgaatatgacaaaaatcccacttattactctcckgagagcttcaagtgcctatatgacccaaaatacaatggaaagcctattggcgaaagtcatgggttgattgatctaaccctgagataaaatacttattaaaatattatcttttaatgggtttcagacaactgaggctaagccctttaattactttaaggaccatgctcactgaagcttttaaaaggtattttcaaaagcttaattgcccaagaaaataatcagtgtaagagtattaggttacccagcagaaaatgatgtcttctacataccygtctacatcacaagaagggaggggtaaaaaaggatcaagatcttattcttctgtaagcctacatgtgcatgagtgttatgattttgagactactcttatatacatgtaatttgatcctcttatcaaaacaatatagagaataactgagcccaatctttttagtcatctcttcaacaaggggtaaatcagtcagtttctaaaactggtgggaggtctccataaacctgataacaagatcccaaaatccaractgattgactgagttaattcctgatcatttgggttgaacttaagagttatacaagaaaatggtaggggacgaggaggttgtataaaggggaaaaaacaacaactgcaaaaagcccaagagcctgaatttagaccaatctatcatcttcctcctcttaaaaagaaaacaatttaaaagttttaaakaaaaaataaaggtcatgtttttgttttgccaagaatcaaaagattttgctgaaactactgctgcaaaatattttgtttcaagccatcttagggcacctcagactaaaaatgaaaccatgatcaatttctatccccttaccacttctatgacaatcacacatggtaaatacaagctctgctctagtactacaataaaactgtagaactagagtagaccttgtagtgatcatatattactacttctcctcttgtcctatgtccatcttatttcaatctaaactagaaatgacaaaattcttgttgggtcgaattgtcttttgagtagttttagagctttttgttttcatttctccaagatgatcttgttgcatctgcagttcgagtttttaaaatcaagtagaataatgtcaaaaggggacaatttatgtgagaaatcaactgacagtacatgattatttaaaatgaaagttttaaagaaaattttccccacaagggaatctgtgtaagaccagaaatcttatgattggctagctactatataaaatgctctgtacacaagaaatattttctattgtccctagccagtaaaacaagaacaaactygtaccaaacatgaactacagtatatttatactgctgtgctaaatggtgtttgtgggtatgtttttcttctctctaggggagagtacggtttccatgaatatacagaggtcaaaacagtcacagtgaaaatctctcagaagaactcataaagaaaatacaagagtggagagaagctcttcaatagctaagcatctccttacagtcactaatatagtagattttaaagacaaaatttttcttttcttgatttttttaaacataagctaaatcatattagtattaatactacccatagaaaacttgacatgtagcttcttctgaaagaattatttgccttctgaaatgtgacccccaagtcctatcctaaataaaaaaagacaaattcggatgtatgatctctctagctttgtcatagttatgtgattttcctttgtagctacttttgcaggataataattttatagaaaaggaacagttgcatttagcttcyttcccttagtgactcttgaagtacttaacatacacgttaactgcagagtaaattgctctgttcccagtagttataaagtccttggactgttttgaaaagtttcctaggatgtcatgtctgcttgtcaaaagaaataatccctgtaatatttagctgtaaactgaatataaagcttaataaaaacaaccttgcatgattcttgttacttttgaatttttttaagtacaagttttggttacagtgatttcttcttgtcacttaaaaacagtgttaaactgagcataaaggtacatttaaaagtaaaagtctaatccacctattctcaaataggtaaagaaacatgctgtattttccaaaagaattctcaaaatcagtggattttatctgaaatagatggcctcagtccttcagtaagcaattattgagttcctacaaagttttgggtatgtgttaagtgttgtagaaaagaggtgaataatgaatggtccattatctgaagatctttaatttagtggttaataaagacacaatccctgcaccacagaaaggaggggtcataaaaaaaatgaggattttagaaacttgtagtgacttgcagaagtggtcatgatgaaggctaactgagggaatcaggaatggcctcaggtaggaaatttgactgaatataaaccttaataatgggcaaatttgcaatgaataaaggggaaagaggttctacaaaatttatcaggacatgttccattgaaaaaacattcggaaaaattctatacaatatattttcctctcttggaatttcagattgcacatcggcagcatattataggtttcgagaagtcctgcaaccttcttagttttaatagagccccccctttttttttccaaattagcagagactttgtctcctctccctcacctcctcagttaccaccaattaacattaagaaacccatgctgggctgaatacagtggctcactcctgtaatcctagcactttgggaggccacagcaggtggatctgttgagcccaggagtttgagaccagcctgggcaatgggcaaaatcccacctttatttaaaaaaaaaaattagccaggcataggggcacaaacctgtggtcccatctacatgagaggctgaggcaggaggatggcttgaacctgggaggtcgaggctgcagtgagccatgatcatactactgcactctagcctgggtgacagagtgggaccctgtttcaaaaataaaaataaaaataaaaacccttgctgtcctatgcaatgagggaacccttagagttctaaggagagatctgggaatcaaaagagagcagctgaaaaaaatgtcctccacatgaaactacaccaagcttacacatttaccccctcataacagaattgctgcttgtgttttcattcttctgttgtgcttccatatacaaagtgatttaggcccaaatgaaatgaacatttgtgtataactatacacattctaaaatttttttagtttggcaacttaggataacatttttttcagattttatataagtttatcattttacattaacagacacttcagtgcctctattattaggacactactagctgctgcagtcaagtgtaacaatgtaagaacaaatgaagttcattggcttcttttacaggaaataatttaactcccatttcgagagtttttcaaacttatgttggcctataaactttgcaatttggactacctcgtaagatttgggacatgtttacccttttgaaaactgaagaaaccaaagccttggggagaactgaaaggtctttggacaatgagaaggaaaagtgtccaaacacagagggagttgtgttttcctaaagccagacagtgtctacattttaaaagatgtgtttaaagccacgtgtaaataaattaataggtagacaagttaatattgtaatggcatgcaaccagaacattttaaaatgtgtaacaaagaaagcagaggacagaacaagacaaaagccagaagcaagtttaaatattagaaaattttcattgtataaataagacattacagrattaaacagaaaatatctgttttatattggctcgttctgagtctctagacattatttgtattatatttcattatttatattaaagccatacaggtagtaattcttaaaaccttgaaaagttaaaaagtatcttattagctcatgtgctagaggaattccagtaagaaatttcatcttgaaaaattcagttttgcggtcataactatgatctcattgtcctcagtgtacaaatggtaaagtatttttatctccaggaataccaaactaagtgacagaggttggaattcacttttttaggcagagacaacatcaggtatcagatactcattcacaaatgtctaatctagttcggttttcttctttttcttttttctcttttgttgttgtggttgttgttgttgttttgtctttttgttgttgttatcttctaaggatacatacttctggctttattgaatacatacctctggctttattttgaaacagccaacaagaaatggaaggcaggttaaacgtttttcttaaattcttgtgaccaactcaaatagaaccaactcagagaattttagccatttcttcacataattcaggagggagcaatgaactcaaaagatcttttgtctgggcaatgtgtgtaatgttttgagtgtctaatttcacttgaacacttagaaatgcaattctgcaaattagttctcctggctttttcagagtatactacatgaccaggttacattttcacatgaaacacatttgctattagagtttcatttactgatttatcctgggattttttaaaattttattttattttaagttccaggatacatgtgcaggatgtgaaataccatttgacccagaaatcccattactgggtatacacctaaaggagtataaatcgttcttttataaagatacatgcacatgtatgttcactgcaacactattcacaataacaaagacatgaaatcaacccaactgctcatcaatgatagactagataaaaaaaaatgtgctacatgtacaccataggatactatgcagccataaaaagaatgagatcgtgtcctttgcatggacatggatggagctgaaagccattatcttcagcaaactaacacaagaacagaatgccttgggattttttaatgttctctggagacgtgtttgagcttttccagtctggtggtgaaagaatatattgaaagggaaattggcaatgagaactaaattttctagataccagaatttagtgactgccaggaatgcaggaaagctttctgttgtaggacacaaggactgtagcatcctggagaatatcctgagtcaagacacaagggagggaaaagagttcacttaccattctgacattctgtggaagagcagaggtggtgtctctctgaagaccaaaccacaaaattatctgtgggtgcttgagacaagtcaagatcatgtctcttaattggccctttgattctgggtggtgggtttatcccagagaaaaacagtctcatccataaacatctaggttaattcccaattccctagcaagtcaagtttatcacgtaaagaaataccaaaggaataacaatgctttttggacatttagtgttgctgggcgcagtggctcatacatgtaatcccagcactttgggaggctgaggtagctggatcatttaagtccaggagtttgagaccagcctgggcaacatggtgaaaatccctctctacaaaaaaatacaaaaaattagccacgtgtggtggcaggcacctgtagtcccagctactcaggaggctgaggtgggaagatcacctgagcctgggaggttgaggctgcagtgagtggtgatggcgccactatactccagactgtctcaaaaaaaaaaaaaaaaaaaagaagaagaagaaaagaaaagaaaaataaaatactttagtgccatgtgctgaatagtttcacaagaatttagtttttaaaaaatggacatctctgagttttacagacatgttcataggaggctgccatagtgctatgctgaagtgtttcaccagagttttaggattttgtttgctttttgtcaagtcacttatgtaaagattcatcagggttagaaaaatacactaaatatgaaaacacaaaattgacctaggtaggcaactgattttcctttaactttttattttaaaacaatttcaaacatttagaggagctgctacagcagtgccaagaactcccgtatagcctttgttccttatttttaaatattattctttcttgacattatcattttcattcttttttttgagacaaacttgagaataatttttagacatcatgcccttttaccccaaatccttcaattgggtcattctttcacaaaaccacagcacaattatctcattcaggaaatttaatattgacaaaataccattatctaatacatgatctatttaaaactatttaaaatttttctcaaattgttctaatatccttttttttttttttaaatgtagtctccctctgttgcccaggctggagtgcagtggtgtgctctcagttcactgcagcctccacctcccaggttcatgagattctcctgcctcagcctccgtgtagagacacggtttcaccatgttggccagactggtcacaaactcctgacctcaagtgatccacccacctcggcctcccaaagtgctgggattacaagtgtgagccactgcacccggcctactaatgtcttttatggcgttttccctcattatctaaaaattaattctgaatcatgtgttatatttagttattatggtttcctttcctcttacttttccttaataatgacaatacaacttgtaagcacacctaatattcaatcaggttgctaatactgtcttggcttgggagggaaatgtaagggatgagttaacaagaatcagccaaaagcaggtggatggttttagagagtaaatagttcaatatatgattattaattaccattctccatgataaaccagataagagtatgtatgcaggctggaaaatgatccttctttcttggacaattgtaaagaaaagttgaatgttcccttgaggatcttggtctctgctcttggtgtgtgttattacaatattgccctttgttagttgatttcctagcttatttgaacatttttccttaataacaggttgcctatgttctgatgtcatctgggtagatacctacatatcaattagttacaaatcccttagtcacataaaacattttaaattactttcctttaaaagtccaattacagtagaaagatcttgatttttagatttaaatagatgctgcattctgattccgccatgtactagtggtatggtcttaggtcacttattaaacctttctcatatagtagtcattcagcagatcagagtggctactaatatttgtgaagcaatacaatgttatttagaacattggttatgcataatcacatgggaacttggagcccagcaatttggtttccaattcgtattctgcactcagtggtcttgggatttggaaaaaattatccaatcttcctaaattccagtttcctttatgtaaaaagaattaataatgatatctatttaattgggatattctattaaatgaaataatatttgtaaaatgcctagcaggcttcctaagacacaacaagtgcccaatacatgttacttatctactaaatggatgtctaggcactgacgattatttcaacaaaaataatatgtttcctgtacacaccaaggtctccctcttgaccttgactttgaatcttccttctacatcctctttctctcagtcttcctttgtcctagttgttagaccaatctcagttactacttcataattgtgatgctttgcccattccatccattcttttttttttttttttttttttgctgttgtttaatcattcccttcagataaaggctaaaattctccatcaaagaaataacagggtggaaaagaatgtgagccaaaaacccggcttagagttgaggttagaaatttaaatacatctaataccaaagcagggctagttctaattaaatgaactcaactgcctttcactccatagttaccagtcatcatggctaatctttacgctaatagtcagggacagggggactaaaggaacaacaaacagatgaggctggtttcaaatgca

SEQ ID NO: 93679 - DNA, 42003 bp, Homo sapiens
ggataagttactgcaagaacaggcattatgaagtaagcccagcctttagtgtttgtctctttgcatatgtcccctcagtgttccacttctctgccatgtcttgacacagcacatggccctccccagaagctgatcagatgcaagtatcatgctcttatattttccagccttcagaatcatgagtcaaatcaacctattttctttataaagtacccatcctcgggtgttctgcttagcaacactaaatgaactaagacactaagacacaatctcatgcttattccttgatgagacatgggctagcataagaacccaaaacagtcttaaagcaattgagtgttactcgtattagttagcggtaattgaatctatgaccccggagttgcaagataaaagatataagtttatcctcttaggagcccttcggtctttctcaaaacattcccttcctttgctgtctttctcactgtaaacttctggttgtcctctaatctctcagactattacatattaggctcctttagtcattgactatagtggtctgaatagtctcccaaaaatcgtgcacacacacaacgtgtgaatgtgatcttatttgtacaagttgcacatctctaatccaaaaatttgaaatccaaaatgctccaaaatctgaaactttttgagcaccaaaatgatgccacaagtggatgataaagataatgttaactcagcaggaaaagtgtctatagctgacatggtgaaaatctgtgatgggcttttttaagcactagagcagcatgcatgtataagagaacaagaaaccatgtcagcttatgaaatcaaagagtgccttctcagacaaaaaccattgttaatgaggtgaggcagatgactctggaggacagatttttaaaatccatccagcagattgactcctcatccctacgggacccactttctggtccttcaactgcttctgacatttcttctcatctaaaatataaaatatggtctacataaccttaatcaaaacacagcatcatatctagagactgaactcctgccattgtttgctgttactgctgtttaacagctgatacaggtaatgtgctgatgctgctgtgctgctcagttgacctaaacacattatttcttcactgtactaatgattaacaaaatattttactgttaattactatgtgtgaataattataagaaaatgattgcctatcagtagcatataaactcagagtcaggaatgatgatgatgccaaacaaccacagagggcctacatgggtggttcaatgtacatgaactttgtttcatgcacaaaattattttaaatattgtattaaattactttcaggctatgtgcataaggcgtatatgaaatgtaaatgagaatttcatgtttaggattgggttccatccccaaggtatcttattatgtatatgcaaatattccaaaatgtaaagaaatccaaaacccccaaatacttctgttcccaagcatttcagataagggatactcaagaaaagaaaaggagaggggaggggaggggagaggagaagaagaaaaagacttccttctctctgctttccttagcagcttgtacctgcctctgccacaaacattgtattatctgaaattgttgatgtcttaatgtacaaacagttccttttcaagagtagtgacttgtcatagttatctttttaaatcaattacagttcctagaacagagtaagaattcagtaaatgtttggagaaagaatctggtgtctttaattccgtccttgggcagtcctaagccaagcttctaaaaaggcaacactgagctatgaaccttgctcatttatcttagtccctcaggagaagccttctgctgttggtgcctgacaaatccaaagtctagtttctctggcaatcaaatttaccttcagtcttcagcttctattgtctggtaagctcttcccaacttaacccttgcttgtcccttccccaccactgtgactatattctgccttgcatttgctgatcatgaccccccagtgcccctgcattccattagcctgccctgatgggccatttctctgcctctccatctggcctgaatcatcagccagcttgcaatcaatcagcacccccaaccgtctcaccagtacaactccaggacaggccaaatagaaaattcagcaaactgtttaagggttgaaaacctgcaccttaggatttgatgctctcacagctcttcagtttggcttccttaaattgtgttaccactgattggaaagggggtaaaaaaatcaattaattacgtatttttaaaaatgcctgtgtgaggccaggtgcgctggctcatgcctgtaatctcagcacttccggaggccaaagtgggaggactacttgaagccaggacttcaagactagactgggcaacatagggagaccctgtctctacaaggtattttaaaaaattatcctggtgtagtggtgttcacctgtagtcccagctacccaggaagctgaggtgagagaaatgcttgagcccgggaagacgaggctgcagtgagctatggttggcgccactgcattcaagcctggataacaaagtgagactctagacactctgcctctcaaaataaaataaatagcctgtgagtaataaatactacaaatcacagacgggtgcatcaacgtgcttacaaaaacctttggtcttttccttggcccagcactccaaattcctttgaccgaacaggttcctactaccaaatggaagaaatttaaattgagacagagtctcgctctatcccccagctcaatcccccactggagtgcagtggcgtgatctcggcttcagctgactccaacctccgcctcccgggttcgaaaaatgctcatgcctcagcctcccgagtggctgagattacaggcatctgccaccaaacaccgctaatttttgtattttttagtagagatggggttttgccatgatggtcaggctggtctccaactcctgacctcagttgatccacccaccttggcctcccaaagtgctgggattacaggcgtgaaccacacctcctggccaaagtttaaattttcttctaagtatctaaggaaaccttgctcagttagagtcctcccctatcaaaaaaaagccttaagtccccaggaacatcaacatatctagttacaagttacaatttaccttgatctacaccttatttagatgtttccggtgcttgttaacttctataaaaattcaggaactacttttagaatggacaagctcaaacacataaggatctgtgtgcatggattaactgagaacaggccttaaaagttgccaaatagctttagtcaaaaacatttggaggctgaggccttaaggtttgcttaaatgcatgttactaacaacagccaatgttcatagcgtttttacaacgtgcagaccactgcactgattagtttaacacagattatctcatttattcctgtcaacatgcctgcgagaaaaccaatacagagaaaggttaattaacttgtccaaagacacccagctattaagccatcaaatgggatttcaactacttgaagtctctgaacgcagaagcattttgcctcgtgggtttctaacaggtttactagatactgtgcctggaattggtggggttttggtctcactgacatcaagaacgaagccgcagacactcgcggtgtgttaacagttcttaaagtcagtgtgtccagagtttgttccttctgaggttcggatgtgttgggagtttcttccttctggtgggttcgtggtctcactggctgctggcgtgaagctgcagactttggcggtgagtgttacagctcttaagacagctcggctggatttgtttactcctccctgtgggtgcgtggtctccacggcctcaggagagaaactgcacaccttcgcggtgagtgttacaactcataaaagcaatgtggacccaaagagtcagcagcagcaagatttattgcaaactgcgagaaaacaaaaccaccacacgctgcaaaagtatccaagcgggttaccgctggtggctgaggcagcctgcttttattctcttatctggccccatccacatcctgctgattggtccattttacagagagccaattggcctgtttttcagagctgattggtccattttgacagggtgctgattggtgcgtttacaatccctgagctacacacaaaagttctccaagtccccactagattagttagatacagagtgctaattggtgtatttacaaaccctgagctagatacagagtgttgattggtgcatttacaaaccatgagttagatacagagtgctgattggtgtattcacaatcccttagctagacataaagattctccaagtccccatcagattagctagatacagagtgcccattggtgcatccacaaaccctgagctagacacagggtgctgattggtgtgttcacaatcccttagctagacataaaggttctccaagtctcctctagactcaggagcccagctggcttcccccagtggagccggcactggggccacaggtggagctgcctgccagtcccgggctgtgagcccgcactcctcagcccttgggcggtaratgggaccgggtgctgtggagcagggggcggcrctcgtcagggaggctcgggcagcgcaggagcccacgggtgggtggtggggaggctcaggcatggctggctgcgggtccgagtcccaccccgctgggaggcagctgaggcctggcgagaattcgaaggtagcgccggtgagccggcattgctgggagactgggcacaccctccgcagctgctggcccgggtgctaagcccctcactacccgggtctggcggagccggcccgccgctctgagtgccggcccgccaagcccacgcccacccggaactctagctggctcgcaagcgcccgcacagccctggttcccgcccgtgcctctccctccacacctccccgcaggctgagggagccggctccggcctccgctatcccaggaaggggctcccacagtgcagcggcgggctgaagggcccctcaagcgcggtcagagtgagcgctgaggccgaggaggcgccaagagtgagcgagggctgcgagggctgccagcaggctgtcacctctcaatacttcctttttgttatttagctgctagcacaaagattttactgggttatctcagccttttgctgccaggacctagataaaagcagtggctccttgaccaacctattaggtaaacttaaaagagagccatttggcagtgagtcaataatcatctaggaagtactcagtaaatttgtgctgaatgaatgaatctgttcattcattttaataaccattaaagaattttttaaagtcaaagagaggttgtctgaaacccttccctcattgagtgctcacattaaaccttgtacattccattttggtgattcaggaaggagaaattgcagaaaagttgagggaggtggggagtaagaagggttattttgtaagaaaaaaaaaggcaaggtgctagacccaaaaagatccggatattcacttccaacataattcttatttaacgaaaggtcagaaattcaatgtgagggtagacactaaaattgaagagactcagagtgatttttcaaaaatttttgtcagaactccatcgtcactccaaaatgctgagatcttcgagaaagtgatgttgaaattcgtcttggtcgccgggatgcttcccaggagagtgcccagagtttcactaacgaaagatgggtatttagcatagccatggtctgagcgggcaaaatgcacagtcccagtgactgagaggaggccagcggagcgcgcgggaacgagggtggggccgctcccggctgggcgcagctcgggagccccctgcagtggacccaagtcgccgccagatggttcccgaggattaggatcacgggcacttccggtcccctcggtcagcccctgggctagcctctgggccggcgcctaggccggccaacgcggacgccgggttgcggtgattcccagcggcgaggtcaagagtcattggcctggggctgcaagcgcctcgcgcctgggctaccccgcgccctgcgctctgagggcgatgatccgggacggggaggcgcgcgccgcgggcggccataggccacggcgcggggcgggagggggcgcggcgaggcccgcggcggggcaaaaccggcctgggccctggcggccgcaggagcgcgtgcggcgtggactttgccgggctcgccacacagccccagacccgtttaggaccgggagaccgaacgcagcgtccagccggggagtttcggcggcgttctccgggcaccgcgcgcgggaagccagacgcagcggggggacacatctcgcggtggcgttgccagagtgaggagttagcaggcaggacttgacgaggctctttggtttttctagtcctcaaccactgaagaagaagcttgatgcttggctgtcagaagacatgaattacgcacggttcatcacggcagcgagcgcagccagaaacccttctcccatccggaccatgagtgagaaacggggtgaccatctctcctttggggtggggcattcctcgcacagcctctaaggaggrttccctagcaagccaccgcttggttgcatccatgcgtacccctgtgcacgctcgcggtgagccaggctctgcgtgcagaaatgaaatagacacagcctttgttctcaaagaactcgggctgaaacggaaggcgggtatttctgctggagcagagtaggagcaacagtagagagaggcgcagactgctgtggggcacggccttggaagggagggggcgtgctatcaagaaaggctcttcctgggaagctgagaaggggcatgcacagcgtgcagatgggtgtacagtggagagggccaggtaaatgggagaggggtgggccatgaagctcacagacaggtcggggctaagtggaggagggcttctgctattgtggccctttgctgtctttctgatccctctgccttctctttggtcaccttcattctttagtccctccacaagtgaggtgcctagaaaaagttattctgtatgtttattttagactagcttttgtcttagtccattcaggctgctataacaaaataccacaaactgggtaatttatgaacaatagaattatttctcacagttctggaagctaggaagtctaagatcaaagtgccagcagyttctgtgtcwssatggtgagagcccttccttatagacagagccatcttgctgcatcctcacgtggtagaagggagaacctatgtcctcacgtggcagaagggccaagggcattccctcagccctcttttataagtgcaccaatcccattcaggagggtggatccctcctgacctaatcacctctagagaccccacytgttaaaactatcacattagtattaacttccaagtatgwatctgggggagcaccaacatttagaccatagcacactctatcactagaaatcgttaaactttatagttttattgactrtaatgcatgcttaactatccgcttataacaatcttcaatgaaattgtttcttctcttccatgtgtattgtagctgacatattgagcagaggaccaaaatcgatgatctccttggctggtggcttaccaaatccaaacatgtttccttttaagactgccgtaatcactgtagaaaatggaaagaccatccaatttggagaagagatgatgaagagagcacttcagtattctccgagtgctgggtaagtatcaatacttaacataattttattggcttattttcataagaaatattctaaggcccattgataaagaatattaaagaaatattctaaggtccattcataaatattctaaagccattgacccatttggtcattcaatgaccaaatactcagtcattgaatactaaccaaatgagtattcaayggttaggaaggtctggggaaaggttttcaaaggataattaagaacagaaaggatattgaatgtttaacactcctcagtgattgcttctcaatcgcaaatgaccaagaaggcttctagaaggaaataccattagagctgagtccaaaaaaatgagaagatgtccaggtgaaacaaacatatcaggagaaatgaagaaacggaagatccaggaagcttcaactttttaaagtttaagcatcctggatcttccgtttcttcattctatagtctaaacaagcagtcatgcaaatacattgaatatagtcattcatttctatagtctaaacaagcagccattcaaatacattgccctcataggttcaaatgtctttaatttcttaaaggcaagctgaaacatataccttgactttcttagctggtcttcttcaagtgataaaggataatttatagagaatctataaattatactttattaaaacctgctttgttctgtgattgaaaagtgtattgaaatgttattcatgtatatatgtgttagttatgtaatatgttaaatatacataggcttattcaaacattccatgatacaaacaacttattgagtctgaacttctaggtagccatagaactcttcctagagagaacaaagaatcgattatgcaaygcatgcgctaaagacttcaggtttggaataagaaagatgtagattcaaatctcagctcatttattacgtaattgactttctgagaatttctggctgaatgacttacaggaatttcctaatctctaagtctactgcctatcttttaaataggaatattcatactggcaaaaagcatttgagggttttttaattgagtgtacaaagtgcttgataaagctgtcatttattatttcctgtctactactgttactatgatttttactactatgaatttaaatatacattttttgctttagaattccagagcttttgtcctggctaaaacagttacaaataaaattgcataatcctcctaccatccattacccacccagtcaaggacaaatggatctatgtgtcacatctggcagccaacaaggtctttgtaaggtaagactgaaaggaaaactcagccaaaatgtagaattggaagcattcatttctatagtcctctcgcacttaaccacagagaattatattttatggattactggtagtctttcttgtcttcacctagaattataaacagggaactaaaagacaagtcataggatgggggtgggagcagttgtggccggggatgggcaagggtgggtagggggtgttgactgtaagcaaaagccaggtggaaatattgtaggttgatctatcaatatttccccctagttttcctcattgtgaacacaaggactttgaaaaattacctgctcttaacatcattcactagcctaatctttcttaaatattaaatacagagcatgtggtcaattacccagacctattaaccattaaagcaggatgcccactaagggagtactcaactcctaccaaaagcttagtgaacactgcttaatttcatctggctcaaaaattcaagttacgtttgatttccgcctatagttaggaaatttcaatacaatttttaaattttttagagggcatgctttcatattcctgagatacacatatttatattcttttacatatctgtctgtagaatctctccttgccactgcttgtatcttgtccccctcttgggtgtatttctctagatctatttatatgtctgtatttctgacttcttatatggattggttctctctccctctccccctggcattagttattccatcttcttcccttctgggttccrggaactccacagatgtaaacaccactggttagttgccacaataaagagaccacatctgtggtcctcagtttgatctgttattttcttttctttctttttttttttttgagacagggtctcaccctgtcacccagactggagtgcggtggcgcaatcacggctccctgcagtctcgacctccctgggctccaacaattcttccaccttagcctcccaggtagctgggactgcgggtgcacaccaatatgcctagctaatttttatattcctttgccatgttggacaggctggtcttgagctcatgggctcaagcagtctgtccaccttggcctcccaaagtgctggtatattttctcctttgttttccatgaataataagattctctatattcattctcagatctaaattaatctatgactcccatttatctttatcttaaaccagagtagttttctttttcatggaaatatgaaaactgtaatctggtttgctttaatgaattttaattaaattattgttacagaataatgggttacagtagtaaaaacattttttaaagtttttaaaaattaaaaaaacttaccctttttgtatttaattaggaaaagtaaaagaattagctagtgtttgagtctttgcttgaagagaaacatttgtgattgtatagaatgatataagagtattttttaatgaaataaattctttcctcaagaaaggatactatggactttttcttccagaaagttgctcaagacagtttcttctttatccatcacaacaccagttacacaaaaaaggaagatagcatagattgctaaatacgtcaataacttactacttacagacatgcttattataggggcactaatatgtatctggtttaatatttcttccactttgttctccaggagtcatgttattttagactcctgtgtttctctctcatcttttaaacagtgctcccagatgataaacagccttcccttctaatttaggatatttgaaatttgtatgtcccctaactgatatgaaaaatatatttacagttgacccttgaacaacgcaggggtttaagggcaatgactccatgcagttgaaaatctgcatataacttttgactcctccaaaacataactaccaataggctactcttgaccagaagccttactgataatatagtcaattaacacatattttatattttatatgtattgtacactatatttttacaataaagtaaactagagaaaataaaatggtattagaaagtcatgagcaagagaaaatrtatttaccattaagtggaagtggatcatcatataggtcttcatcctcatcttcatgttgcttaggctgaggagaaggaggaagaggaggggttggtcttgctgtctcacgggaggcagaggcagaagaaactgtgcgtgtaagtgaacctgtgcagttcaaatctatgttgttcaaggatcaacgctaattaggttttcatttgatctgttgatatgtacgtgctgccacccaagtgattcctttggtcctaggatgtcttgtaaagcttaagtcaattagaaacttttcggaggaggatactgtttgtcataagatgccaaaagctcataaggaaaaggtaaattcaacatcacaggtcagttggggaacaaaagtcaaatcttctatctcaattgataatggccctactgtttgtggtgagatgtgggttgttaaagtgataggaaaaaggactcaaactggggattgtgaaacatcacaagttaagaagcaattattctgtgacttatgtatgatttagtcataatagacccctttgatttaggctggaaaaatctattgcctggctctagtgattgtagtagaaatcatattatccacataatttacaaagattgtcaaaccttttattacttgacctagaaatattctttaactccgttgatctccccatccattttattttaaaaaattaatttttaattttttctgttgccataaaatacacatataagatttgctatccttgccatttttaagtatacagttcagtggtaataagtacatttatattctttatttttccttcaccctatctccctcctgtcctttccagcctctggtaaccaccaatctactctctatccttatgagatccacttttttagctcccacagatgagggagaacatgcaatatttgtgtttctatacttggcttatttcacttaacataatgacctccatttctatccatgttgctgcaaatgacaggattttattccttttttatggttgaataatattccattgtgtgtataccacattttccttatccattcatcagctgatggacacttaggttggttccatattttggctattgtgaataagtgccataataaacatggaggtgcagatacttctttgatatattgatgtttttgttttggatatatactcagcagtggaattgcaggattatatggtagttctattttcagttttttgaggaacctctgtactgttctccatagtggctgtaccaatttacatttccattaaagtgtataaaggttcccctttctctaccctcatcagcatctgttatcacttgtcgttttgaaactagccattttgaatatggttaggtaatatctcattgtggttttgaggtttttctgattgcattggtaatattgaacttttttaatgccttttggccgtttttatgtcttcttttagaaatgtctgttaagatcttttgcccawtttttaatgggattatttgggggttttgctattgacttgttaatcccttgtcagatgggtagttcgcaaatattttctcctctcctgtaggttgttctagttccttgaagtgcattattaggttgttaatttgaagtctttctactttcttgaaacaggcgtttattgctataaactttcctcttagtactgtttttgctgtcttccacaaattttagtatattgcrtttccattttcatttatctcagtaaaacttttaatttccttctgaatttttcattgacccattcaggagcacgttgtttaattttcgtgtgtttgcatattttataaagttcctcttgttattgatttcyagttttattattgtggtcaggaaagatatttgataagatttgggtttttttatttgttcagacttgttttatagcctaaggtatggtctgttctgcagactcttcattgtgctgatgaaaagaaagtatatgctgcagcagttggttgaatatttttgtaactgtctactaggtctattagatctagtatgtagttttatctcactgtttcttcatgttgattttctgtctggataatctgttcattactaagtgaaatgttaaaaagtctcctactattattgtattacattccatctctccctttaaatttactaatatttgtatacttgggaggttgtattatcttgctgaattgacccctttatcattatatagtgaccttctttgtttctttttacaatcttaggtttgtagtctattttttctaagtgtagctacacctactctttttaggtttccaattccatggaatatgtttttccacctcctcattttcagactgtgtgtctttataggtgaggtgggtttcttgtaagctgcatatgattgggtcttgtttctttatccactcagccactccatgccttttaatgggagaatgtagaccatttccattcagtgttattattgataagttagaacttactactggcattttgttgcttgtgttctggttgttttgagactcctctcttcttttcttcctttcttactgtcttcctttgtggttaagtgattttctctggtagtattttataatttgttgctctttatttttagtgaatcaataataagtttttgtactgtggttaccatgaggcttacaaaaaaaaaatcttataacaagttattttaaagaggtaacaacttatcttggatcaacttatcttggagaagcaaacaaatgcaaaaaacataaaaaaatcctctattctttaactccattccccccacattttggcttgagatgtctcaatttacatattacctatcttaacatgttgctgtagctattattgtttttgatcaatttgtcgtttaggcttcatatgagaattatgagtggattgcacaccataattacaatcatagagtattctgggtttgtccatgtacttaattttaccactgtattttttaccttgaaaagttttcttttgcacattagtatttttttctttcaggttggagaactccctttagcatttctcgtaagatggatctggtggtggtaaattctctcggctttagtttgtctgggaaagactttatctctccatcatatttgaaggataattttgctggatacaatattcttggatgatcgcttctcggccttttggctaagatcaagtgtacaatatttttggatgggccgggaatggtagctcacgcctgtaatcccagctctttgggaggctgagatgggaagattgcttgaggccaggagttcgagcccagcctggttaacatagcgaggccccatctcagtcaatcaatcaataaaaatatatgtatattcttagatagcagcttttttctttgggcactttgaaaatgtcatttctctttttcctgacctgtacagttccattgagatgtctgttgccagacaaattagagctcatgtatgtattattttcttcttttgtcttgttgcttctcatatcttctctttgtccttagcctttgagagtttaattcttatatgccttgaggtagttttatttggattgaatctgtttgatgttctcagaccttcttctgtggcctggatatttatctctctcacgtttagaaacttttctgttattatttctttaaataagctttgtactgcttgcttttgctcaccttcctcttgcagaccactgattcttagatttagtcttttggggtaattttctgtatttcgtaggcactctttgttcttttttcttttttccccgactgtattttcacgtagccaatcttcaagcttacctatttttccttctgctgggtccattttgatgatgagagcctctaatgagttcctcagttcaacaattctgagttcagtatttctcagttccaaaatttctggggttttttgttatttttattatttcaatctctttgttaaatgtctctgataaatttctgaattgctgttctgagttaccttgaagatcactgagttttcttaaaactgctattttgaatttttggtcaaaaagctgacaaattgccatcttgttaggatcagtcactggatttttgctttgtcattttggggaggtcatggtttcctgttggctattgtttcttgtatgtatacatcagttttttgcattaaaggattagttatttattctagttttgtttgtttgtttgatttgtctggcttgctttgctttttattggatatatttgcttagtaaatctctattgttgggtcactgcttccttgttggcatcttccaaggtggcaccttaagtccaggtttagtaaataattcgagaacagcctgtcccaaatcagggaggtcccaaaggatttattccattggcatgagatggctagcaaaagaattatacccaggaacctctggaacattcctcctgcagtgtggtgctgctgaacagtcactctgttttggcatgcctttcgctgagttacagtgcagagtttccagggcttgggatggtagtcctgcctcccsattttgtctctgcctgtcctcagggatgtttttccctccaggcagtcatgatgcttccaaagggttaaaggcaaggacaggtctccagccagggaaccaaagatggtggggaaaactcttggccacctcaatctcactttttccagtgtagaagccgtgaattagggggagtttttccacgtgcttggtgccaggcagaattgggaggaggggtatcatagatgctgaagtatgcctttcttaccatctgttcagagttttttcacttctctgtagtcctaggaactgactcatcctcatatttgagttctgggttgtttctggtgtaaattttagcactgtatatttgttagtggttttgtgggagggaatgaagtcaacttgcttctacaccaccattttggaactggaagtctcccccacccttttgaaaacactgtcctcctctagctctctcagtagcatgttgtgtggttctcctccagcccactttccctcccttccttgcagtgtcctcctctacccagccattatttattggagttccctgtagctcagtccttaaacatstctccttagtctatgtacttttcctgggtatcttcatttacattcacatgatcaaccatatgccagtaacttccaggctccttccaaatccatttgtccatctatccatctgacatcatcacagggtgtttcaaaggcacctcacactaaaacaaatcatcctgtcactcagatatggatggctttttggttatgtgtttcagtgaatggcaccacccccaccatctatctagttccataaccaagtatctaggcatcattcttgacacctcctcttcctcatttccctattgtccataatcatgttccattacttttcatttcctaatacctctcagttcttctctacaattcctctgtcaccactctactttaagatgacccttacctgttccaggcctgtggcagtaacttcccaaacaatcctaaaaactttctaaactttccacatgtattctcacccttctttcattctttcatactgcagccagattgatcttttcaagacgagtatctaatcatgtgactcctcctccccactctcttcctaaaatccttacttgcctcccttggctcaaatgcctacatggttggtctctgcccacttctgtctgatgtcacaccactcttttctctacattctgcctcaagacacataattattttggtttttcaaatctaactgttgttaccccgtacaccaactcatcgcttcctccaggatgccttccctgaattccctgaatgcctaggtcttcctacaatgagctcttatgtcattgtgcatctgtacttaatatcactcaccaccgtttttaatttgcacatttattgggtagttatttaattggtgtctagctttcccagtggaccagtagctccatgagagtaagaaccatgtcattttgctattttatctctgacactttacacaggcctggcgtatagtaaacatttaatagattttcaaagaagcaataaaaggaataaatgaatgttagcagccaaacctctgttcacctttctctggaacaggagttggcaaactatggtttgagagccaaatccagcccttcatcaaattttgtaaataaagttttattggaactcagtcacacccattcatttatatattgtctatggctactttttcactatagaggcagagtagttgcagggtagttgcaacagagatactatgacccgcaaagtgtttactgtttggcccyttataaacaatttgctaattcttactctagaaccatgtgagctcaaactaaaaaatgggcttctgagcatggaaacagtactaacctatgctgactaacaagctaacctatgcttcttttgttaggtgtttgaaatgatcattaatcctggagataatgtcctcctagatgaacctgcttattcaggaactcttcaaagtgtgagtatacatttttactaaaggcaactctcttgtagtaaataagaagaaaacttataataaaggttttataataactttattataataaagttaatatcttattaactttaaaataatctgtccacagaaaaatgaaatagcatattttatccataagcaggataatcttaaaggatatatacaaagtatgtgaaatgtattctcttctttatacatttcttttttgaaatccaagtgtataggcattaaaattagattatgcaaaatcatgtccaattctcttaatattttacttgaaatgtaacttaaattacaaaaatttattttttattactatcttattaccatatgcataagtacaactatgttatatgtcagtttagtatacttatatggtataatgacgactttccattccaaggttagatccgtggaactgtgatttacagaatgaggaagctgatgatctgactctgctctgcactggtcagagcacattgctgagcattaggtttgtttggggcagtctactttaagacagaaatgtccacaactggagcatactcagagaaagatagtcagagtaaatagggaattggaagccatatcatatgatgaatggttgtaggaactggagctattttccccagaaagaaaagactcaacagaggcatgaaaactgtcctcaaatacatagaagttagccatgtgacaaaagaattagatttatttgtacatgaccttaggttaatagaactggaaccacagggaaacaatttcagctctgtataagaacttgctaaccattggccttaccggacttcataatgggttacaacattgcccatcactgtaggtgctcagtcactcttgactgccacctaacacaaatatggctaaagtaattctagcttagagtaggggaattcaatgcgatgacttttatgctctattgattccaacttcatggatccttttatttttttcaaattttattttatttttatgaaaatcaacatataaagcaatatataaaacaattccatttgtaatagcatccaaaagaataaaatacgtaggaataaatctaacaaaggaggtggaagacttgtacattaaaaactgaaaaattttgctgaaagaaattaagcaaaactcaaataaatggaaagacttccacagttcatagattggaagacttaatattgttaagatattaatactaccctaagcaatttacagattcaatacaatccctatcgatatgccaacagccttttttgtagaaatggaaaagccagtcctcaaattgatgtgagtttaaaggacctaaatagccaaaataatcttgaaaaagaacaaatttggaagacccccacttcccaatttcaaaactgcaaagctgcagtaatcaaacaatgtggtactggcataaagacaatcatatagaccaatagaatagaactgagcatccagaaataaacccacaaatccagttgatttcagtaagggtgccaagatcattcagtgggggaaaggatagtctcttcaactgtggtgctgggacaactggatttccacatgcatataaaagaacttggacccttacttcacaccatatgaaaatttaactcaaaatggatcaaagacctaaatataagggctaaaactacaaacacttaggacataagggcaaatttttatgaccttagatttggtggattttttagatatgaccaaaaatatgagcaacgacaaccacaaaaatagataaattgaacttgaagatttaaaagtggttgtgtatcaaaggacattatgaaaacagtgaaaaaagagtctatacagtgggagaaaatatttatcataatatatctgataaacctttaataaccagaacatataaagaactcctacaactcaacaacagaaagataaacaacccaatttaaaaatggacaaaggacttaaatagacattagtctgaagaacatgtgcagaaggccaataagcacataaaagatgctcaacatcattagtagagaaatgcaaagcaacataaatcaacgtatgaaagcckcaagttccatgatcgtgtagtggttagtactctacaatgtgtgactgctgtacctgcagtctgattatttggcaagactcaggcttggggaaaaaatttttttaaatagagaaaagcaaatcaaaactactgtgagatactacctcacacataccacgatggctattatttaaaaaaaaatagtgaatatgtgaagaaactgggttcattcactgctggtggaaggaaatgtaaaatggtatggccactgtgggaaagtttgtcagttcctcagaaaattaaaatataattaccatgtgacccacaattccactcatggctatatacccagaaaggattgaaaactgggactcaaacagatacttgtatacaaatgttcattgcaatattatttacagtagccaaaaggtagaagcaactcaagtgtccatcagtggatgaatggataaataaaatgtggtatatacatacaatggaatattattcagccataagaaggaacacagatctgatacatattacagtatggatgaaccttgaaagcattttaactttaagaagccagacacaaaaggacaaatattgtattattccaattatatgaaacatctagaatagacaaattagtggagatagaaagtagatgagtggttaccaggggctggggagagtagagaatggagagttattgattaataggtacagagtctctatttggggtgaggaaaaagttttggaaatagacagaggtgatggatgcacacattgtgaatgtaattaatgccactgaattgtactcctaaaagtagttaaaatggactagacgaggtggctcacgcctgtaatcccagcactttgggcagctgaggctgaaggattacttgaggtcaggagttcgagcccatactgggcaacatagcaaagcacatgtctacaacttttttttgtttgtttaattaaccaggcagaagactgaggtgtaaggattgcttgagcccaggagcatggtgttacagggagccataattgcaccactgcacttcagcccaggcagcaaagtgagaccttgtcacttaaaaaaacaaacaaaaaaggcttaaaatggcaacaattttaccacaataaaactaaaataaaataattactttttctcaatgattggatactcataatttgttttcctaaactcctaagatttaagattacataatgtctatgaatgtaaaaccggtgtctacatataaagcgtgcatatacacacgcacaaatgttttcacatacccaaacagaaaaacagaaactgtatgccaagctttgaggaaatatgctaataagcagtatgtgtttagtttatggcccagtattgatttgctttattcatggtagatgtgcttcataaggttaaggccttttaaatttgtcataaggaggatctgaattgttctttttttatgcgtaattctacatttgactgctaaaagagtgtttgcttttcatttgcaatttttttagaacctcattcaattattatttcttaagttcctttttttttctttttaatgctcaacmatgaatgagattccacaaatttgtataaagctaagtctataagcaatgccagtacaagccagttcagccttagcaattggtaaaatatggaaattctactgtactgcctggtgatctgctcatcccattcagtgtcccgccactaccctggcttccctgacccctctcctaggaccaccctgaacctcccatgttccagagttaatgtcggcataacagggggcctacaggtccccattccaggctgcgctgtatctgatatacccatgctataccacttgttaaatatttttaatatcacctctgcttgtgactgttttatrtatgaacacaacagtaaatgaaacatatgatttactctatcaaaaaacattcatttgtaaaacgcctacttcataaaccagtaataattataattatgaagataattcatgggtactcatcagggacataaagatgtcaacaaaagatactgaggctgactgctggggggagtcaggaagggggcargggcttgaaaaactacctrttgggtactatgctcagtacctgggtgacaggarcaattgtaccccaaacctcagcatcatgcagtatacccatgtaacaaacctgcacacgtaccccttgaatctaaaatgaaagttgaaaaagtaataataataaaggaaaaatcagaaaaaaagataattccgtcagaagaagctaggttatgctgtaaccaatgaccccagtacagttttatttcccttacgttccatatccactacaagactgctggagctcagttccatgccatctttcttctaagccccagattgacagaagcaatctctatctgaaacatggtcaatcttagagcagagggaaaagagacatagacaaccacaagctggattttaaagcttcttactggaaggaacatgcatcacttctgccccraatttgttgcccactgcaagacacatggccatacctgacgtaaacggggcaagaaagaattatataattctctgggaagggacaggaggtatttttgaacaataatggtatctgccccaggggcgtggcagctcacggctgtaatcctagcactttgggaggccaaggcgggcggatcacgaggtcaggagatccagaccatcctggctaacatggtgaaaccccatcgctactaaaaatacaaaaaattacctgggcgtggtggcgtgcacctgtagtccccagctactcgggaggctaaagcaggagaatcacttgaaccagggaggttgcagtgagccaagatcacgccattgcactccagcctgggtgacagagcgagactccatctcaaaaaaaaaaawaaataaatgtgtaacctcaaccctcaggagctcagagctggttgcgggtttatatatttttaagggtatgaatgagcaagttcttagttagaaagaaaaaaaaaaaccaatagcacttayatttgtaatcatgactgactcaggctttcttttgtgctcaacagctgcacccactgggctgcaacattattaatgttgccagtgatgaaagtgggattgttccagattccctaagagacatactttccagatggaaaccagaagatgcaaagaatccccagaaaaacacccccaaatttctttatactgtyccaaatggcaacaaccctactggaaactcattaaccagtgaacgcaaaaaggaaatctatgaggtattgtagaagaatgggttaaagtagttgtgttcctgtttctctgtgactttttagaagagcactatgcaagctccctttsttcttagccttttgctttcaaggaatataatttttaataaaaggaaatcatatatgctcagggtcctaataaatttagacacaataaatttctgcatctttcattagttatgagatttttctttccccataattgatgttttaatataaaagaaacagcattcttggcctgatgttaaattttttgagattatttaatattttatcccaagtttgatttccattattttctgtgttgttaacttgtctgttctgcttcctactccttgtcatcttaggttaccaagaattctttaaaaatgagaggcatgctcccctttcataaaatctatttgagataccgatgatgcctagcttttcactataaacatttttttaagtatcaaacatatattaagctccccagaaatctttgaaaaataagagaaatgtgcyttttggaaagtctctttttatgtacctgactgtgtccccaacctttcactacaaatagctttttaaaataaataccaaacccatgttaaactctatagaatttagtcacatccagtggaatcataggaaagatttcagccagttcgttttacttagaaaatttttaggttcaaaatattgcctcaggttgggtgcagtggctcacgcctgtaatcccagcactttggaaggctgaggtgggaggatgcttgagcccaggagttcaagaccagcctgtgcaacatagcaagaccccaactctaaawatatatatatatatacacacacacatatatatacacacacacacatatatatacatgtatctatataaacacacgtatacacacacacacatacacacacacagtcatgttcttatgtttgtactttccaggctctgtcctaagttctcttctctgtttacatactcaccagacagccttgtccagtttcgtagctgtctattccattacgtacacgatgaccggcacattgcctggcccctacctcttccctgaggcctatgcttctgtatccacctttctgctsatacctccacagagatgtctaaaaatcatttcacacttaacatgcccaaaatagaactcctggttttccacagccccaccccaaacctctgatctacagcctctcacattctccatctccataaagagtgcaactatgaatggttaccctttattcctgtcgttccctcctttgccccccatcccccacatcttgcttctcctgtggactctaccactgagcttatccaagtccatccatttttctctgttgtcatcactgtccccatcttctgagcccctgcctgccctcactggactcctccaatgccttcttcactacaccagctgcatttcgccctgccctctaaccagtcacactcttcacacagcagccagccacatctgtccctgcagaaatgtcagtataaagcccggctcygggttctcctgtttacagccctccggtggtttctccttgcagttaaaataaagccmaaattcttttatctgccttgcagagctagrtaacacggtcggtctgttctcaagccttctctcttatcattcttcttgctgcacttggggcagccgcactgtcctttttagcccttaaacatgtcaagcgttttgcttatcctggggcctttgcccrcattcatccctcagtctagattcttctctgatatttgcacaactgactccttcctgtcattttaagctctgatattacctggtctggaaggccttctcagtgattgaacctgaaatagctaccctgtcactctctccctcacctgttgtaatgctctgcccagcacttaaaagccacccatctagctgggcgcagtggctcacgcctgtaatcccagcactttgggaggctgaggcaggtggatcacttgaggtcaggagtttgagaccagcctggccaacgtggtgaaaccccatctctaccaaaaatacaaaaattagctaggtgtggtggtgcatgcctgtaatcccagctactcaggaggctgaggcaggagaatcacttgagcccaggaggcagaggttgcagtgagccaagatcgcgccactgcactccagcctgggcgacagagcgagactctgtctcaaaaaaacaaaataaataaaaccactcatctaatgtttattctgctcatgatccacaggcttatgtatattctgtctttccccctggaatctaacttctgtgagaataagagcctttaatgccttgttcctctttttatcctcrttgtctaagacaatagacacacagtagttccttgaatgagtacaaagaattataattccaaatgaatttaattttagataacttttaagaaataaatagattaagaaataaacaattacttcaaccttttttagcttgcaagaaaatatgatttcctcataatagaagatgatccttactattttctccagtttaacaaggtaagtgattatgtgaacttacttcactattagaagataagttgttttaagttactgcactgtgttgggtattaggctgactgctgagtcagaactaatccacttttacatggaaaataaatcaattatgattaatttgctactactttacttttcagtcttccagttttattatggaattagtacctttcttttttggtattactgctctttccagaaattacttaccttcaaaatagtagctggctttctataccaggcactgggacaaacagagtaaatcagggctgatggacgtcttaaactccacatccaagttaacagctcctcaaacatcacccagggatgtgaactgagtttcatctttggccgttgacttctgtgtcttggtggtggccgattagaatgatgtatgagaaggattaggaagccgtgctcaagctgaaggagaaagaggctgtgctctgttagcagcrtccccgatggacacaagaggaggcatcacaggcagcgcatcccacatttgccaccctgtcatttatgtcctggatcttactgcagagtaatgggcatttagattgattctcacactatcatgtatgtgagctacctttcatgatgacttttttctgatagatgatgataatgttaagaccaacgcctgattcttcaaaagccaacactttctttgctcttagggctgcaaagaacatatacttggattcagcttgcccttaaatatactgggaagagataagaactcttgatttctctacagggtttcctaaaacatcacttttgcctcctgcctcccaccatcagcatgccagcaaatttcctttctcatttgtagctacttttaaagtaaatgttgaagtcagtctttcatgttgactaatttctcatcttcattctcatcatttttctttctgtcggtcctaaggatcagcgttctctctctgaacacccttcagtgctgctggccatyctcattatggtcttgttcaaactagtgtttcttgagtccctcctgtaagtctgttaatcctggatttcaacctctggggcaaagagggcctgtttgaagtttccytaagttcataataatggcatctggagcaaataataagcccttgtgtgtgtttttggcagaaaagccatgaagacaagcagatgctaataaaagaatctgcatctttgtttgttattccatgttaaagggttgaaataaaggtaagagaatatttgtactgttgttatccaaatccatctcctgttctactctctattcaaaataatcgtacagtgactaacagagctttcagaccaacagtattttttatttttcattttaagttcagggtaccaacatttctttccatggatgttgatggacgtgtcatcagagctgactctttttcaaaaatcatttcctctgggtaaggccctgtgtctctaacttgacgctagatctaatagagccagagatagtacctcagtatcttttagtctagacaatttttttcacttaaaatgcttgtagtctacttgtcttaaaataccagtttcatgattaatattaacacaggcctttttttccctttattcacctgcaatagtcaaagattcttggctgtttatctaaagttgtagtcggaccagtcaggtttttgatatcaggtatraaagggcacatttcgaaatacgtagtcgatcttgttttaaatgtacacttaaatttgtttttgaaataagaagtagttagttttattagaatgttttaattatctagatccttttgtccccaggtcacaattgtctgtctaatgaaatcaggaaagtgatatgtattaattgttaatatggaattggtatcgtgccttttctctttccacgtaggttgagaataggatttttaactggtccaaaacccttaatagagagagttattttacacatacaagtttcaacattgcaccccagcacttttaaccaggtaaggacaatttaggaaatcgatttttttttttgtaatcagattagaattttaaaaaaataatagatggtagagcacaggaactccaaacctgtttagtgactcatagtttgccttctttgcagacatgctaatctttctaaagaaatgggttggaatgcattttaattaaaataaagtaaacttaatttaagagaatgtgtaaatttccttacaaactttgagaaattatyggatccgtctgtaacacaacctctcaggttgcaagaatatgaatagaatagaaaagtttgtgtagaataggacacttgtttgatattgtatgttccataaagtgcagatggccccatgttttaccaagttggagactttttttcatattttttgtatctgttatcaacagacgttcactatcaatttataacattttaatttttttttttttttttttttgagacagagtcttgccctgtcacccaggctggagtgcagtggcatgaccttggctcactgcaacctctgcatcccgggttcaagcgattctcctgccttagcctctcgagtagctgggattacaggcacacgtcactatgcccggctaatttttgtatttttagtagagacagagtttcaccatgttagccaggctggtctctaactcctggcctctggtgatccacccctgttgggcctcccaaagtgctgggattacaggcatgagccatcgcacccagcctagaacttctattttaaatagaaaatctccaaatatgtcatgtaactttacacatctactgtacatttttatatttagagaagcagtacagtatggcaattaacagcgcgggtcaggagctggatagcctgactgatttcaggctgtgggactcagaaaagttaacttaacccttgtgcctcattagtaaaatagaaatttatagagattacatttggtaaaatatattagtatcttacaacagtgcctgctacataacaaatagtatatcaatatttgttatttttactagtattatcattgttattaattgacatttgttttaaatcactgactatataagctaggctcagcttgttatatcttattgtggtttacatgtaatcaaaagtgagttgcttttatatatggcaaaaagtacattttcaggggatgaaacatggtatttatgattttatctcttttagctcatgatatcacagcttctacacgaatggggagaagaaggtttcatggctcatgtagacaggtattgtatcatttctttaaatatttatgaacaaaacaggagcccagtgaacatagtacagatcacctacagtattgatttattcttccttcctaagtatcctcggaaaggagagacaataggaacrgtctattataagtcaaaagtctattcattttgttagttcttcacctagcaagtcttctcagcatccaaggtgtggtttgaaagcagtgtccacccactcctaaggtagtccaaaattcccaccaggttaagatttacttacttaaatgatgtaatgggtaaacttcatacatataaatattttatttaataatgattaattgtgaaggatacatgacacgggatttggctcaagtaaagatgaaggtgaacataatttccctaaatagtctgtatattggtacaagttatggattactttagctgtgtaaatatggtacctcctaggacatttagaaataaggaggaatggggtattcgcattcccagaccggtgattcattatttcaatagtattgtcttttatcctgagtgatgagaaccagtatttagacaactaaacacaaagattgatcctgctacttctaggttccatattttacatagaaatggacttctctttatgaatttttattttgtaattattctacaatgaaggaaaaaacacagcagttaaaagtttttcaccagacaagtgaaacaaatatgctccattcttctatcaagcattcaacattttaatcaagatagaaaacaaattcttatagcctggactctggagactgttttgcttctgcaatcaatgtactgagcacatccatttcattgttttcttyttctagggttattgatttctatagtaaccagaaggatgcaatactggcagctgcagacaagtggttaactggtgagtggaacgtatattcgtcctcatgataaacagtagcatctgtaaaagtaggggataaacactgaatattactaacaatcctggtggaaaagaaacagtccaggagtattcttgccaaggaaacattacaccataaatcatctcagaagcaacatttgataaacctgggcacagaccttcctatccactttacctgtctgctgcaaagaatttgtgattaaaaaaaaaaagatctaaaaatcaatcactaacttacttaaagcttaataatatctattttcaaaaattttagttatttcagaattttaccccaaagggtaaaattgtcaaaccatgcttctctaactaagctgtacaaaggcagatgtcttactgacaaattatttgccttctaatcattaacctcatttatctctgtagtattatctattgctaacttgattgcaaaatgttttagattctttttttattatgaaggtcaaattaatcatatggctttaattatattattaaaatgcctttgatataaataatagtaaaccaaaaatagcaattccttatttctgtcctatcttattttctataaagtcttggtaaaaacagaattagtggctgagtgcagtggctcatgcctgtaatcccagcactttgggaggccaaggtgggtggatcacctgaggtcaggagttccagaccagcctggccaacatggtgaaaccccatctctactaaaaatataaaaattagctgggcgtgatggcgggcacctgtaatctcagctacttcggaggctaaggcaggagaatcacttgaacctggaaggcagaggtggcagtgagccaagatcatgccattgcactccagcctgggtgaggcaaaactccatccaaaaaaaaaaaaacagaattagtatctttctgacaatagcattattttaccactttgcataatagtactgaagaaaaactttgaatcaacagcaagttctttttttaaaaagatagtaatttaaatcaaagatcattatgcttgtttttgatttctctatcctaatactcaatgaaacgtaaagcccacaactgcttctggaattcttgaattttaagtatttcttttcataattaattacattctgataaaaacgctaatccactggacatctaaactattacaagaatactaggatttgttgtaatgctggaagaatccacaaataatggaagaatcctcttctaaattgaaatagccatgtttgtctaggtatggttctaagtgaaggagagaggagtgggatttcttgcactaccctaagactgactacattgtaaatacgcacacgcgagctattcacttgcccaccctacccctcccttcttccctcacccacagtaactctttgaaataaaacccagaacatcaattttgaaggctcacaaaatgatatttttaaaaatgctataattgaaggaacttttttaggaatactagtttctacttactatacttatgccatttaacaacacactttgatatcatcaaaaatgccttcctttggaagacatttattctcttcttttgtttgtaggtttggcagaatggcatgttcctgctgctggaatgtttttatggattaaagttaaaggcattaatgatgtaaaagaactgattgaagaaaaggccgttaagatgggggtaaaactgggaggtgaagggctgggaaacctaaggaaaagttatactttttctttaatattttgcttgaatagaatggaaagaaatgtttcttgttgcccaccagccaactcataatgttctaatattagatattttattgcattatcaaaatcgtaagaggtttttgggttacgtaattatccagctggtctaaattagtggaaatatagttgttcatctcagctactgattagcgtagtggctgagggtagtctccggagccacacctgttgggtttgaatcccagcaccaccccttaggggatgtgtggccttgaataggttaccctttctgtgctttgtctgtaaaacagaggtaataagaatccctctctcatagggttgctctgatgattaagtgagttaatatatgtaaagcccttagactagtatgtggcacatactcagtgctcagtaagtattagccactrgtatttaaaatgaagggtttgttttctgatgatggagataaagtatactcgtggtaggatatttggaaaatgtataaaagcataatgaaaattttttaaatagcccatgattttactacccagattttgtgaccatttatagtatagttccttgaaaagcttgttcttacagtattttggctgtgcacttatgttacatagttaaaattatacagaaaagtttgtatcctgatttttttttcacttaaaattagctcatagaatgtattctaggtttcttttttttttcctctttttatatttaaattataaatctacttaggtttcattggaggcatcaagtaagctgaaaattctaaatatttttctgtgtagctttccagtttaccagataaattattccttctccattaattaaagccatttgcatgtttgtcagtcttttatacacactgaaaccctactgctagattcacttttgtcttgaatcataagaactaaaggacagattggattgatgatggcaaagtgccatgctggtgcataagagacaaggtgctctagaagttagagctagagacagactgcctggacttcagtcctacctccaccaccttgggaaagctattatcctctcttagccatcttacttgagggcaggactcagacttcattaattgttctaaccctaatcacagcacatagtaggtacttgataaacaattgacttacttcaaataaatgcattgtagtataataaatcaatttgatacattcttttctgtcaatgccattatcctcaaaatatgtggtaagtggttatctgtaggtatgtctaagcgaggcgctaaggatatagactttgtttttactctactcttcttcagtcctcttcatttatcccatatatcctgctacatgttctttttttaccttttctaaataatctccagctttatccccactttgtcagcccagatgttggttatcttgtgaagagattaccaccactcccttctctttcagctccttgcttctagtacatcccagaacttttccatgctactgagagaaatgatggttttcattttattttcaaccaggacagagaaacccatcttctgccttgaaatcttttgcccagagtactccaaatcatatcactcccaactcctcttgtcttagcagacagtgtaacaagcagttactcaatgctgttgaagatcatgattatactagtcaaccctaaccaccacagaagataaacttgaaaatctcaaagacttaataagcaatagaaatttatctctgactcacatataattctaagatgtgacctgcaaccctctgtgttccaacagtgattcagagacccgggtttcttacatctcattgcttttcattcttcaacacacagattccaagatggctacaaaatggaaagagcatggcagatcacacatgggatgatttgtatgggccaaccttagacatctcttacctggcttctactcacatccattgattaggattcgctctcatggtcacacacagctagaaagaggccggggaatagggtacatgtgatgcccaggaagaagaggaaatggagcttacagtcagtgagctgtctgcctgtgtggccatcaagaacagcagctgttccgaccaccccatcttgacacgcttatttaatacttttatttcttcattttatacattacattttttacctcctttcagttctttgaatgcagcaattttcttcccatctcagggcctttactctgtgtatctttgccctcaaatactgctccctgctttttgcctgatgtaatttatctttcaggccccagcttaaaagtaactttcagacttattaacttaaaaattacttttctagttagattaaacatttgtttgtatttattaccatttatctttctttaggaagctgtcctttctacattaaagctgaaatttgagtgttctcagttttcgtgtattcctgatgttttgagaagagatagcatttgccatattgattctgaacattttttcagtttctatgtgtttagttttgttcattgtatgacatacgcaatttttatataaattagtattttttcttgtgatttctttaactgcttttaaacttaaaacatccttccctactctgagattaggcttaactatattatctttgagtttttctttagtggtacattacttatcttccacaaactctcttaggtattaatgctccctggaaatgctttctacgtcgatagctcagctcctagcccttacttgagagcatccttctcttcagcttctccagaacagatggatgtggtgagtgtagtattctcctcagagtaacactagctagcagttctgtttttttaatgcacgtgtatactttgtgaattagaatattacttaatatctgtttgggtttctaaaattcagatatttgttgaccagtcatgaactatcattaaaagacccattttactttgttgctagacttctatagaaatgagactaaattggagttaaaatttattgtctgcatgaataatgtatcacaacctactgagctgcgtaaattgtcatgttatgaggaaaacttctttccttcctttattgaattaacatgagccagaagtacaaattcatgatggctgtcactttctctgaagaaaaaagtatcagcaagggtcaaatagaataatattctgaatcacaatctagctttaaccaaaataagctgtgtatgtggaaatcaaacagaagagctataaattgaacagtgccattaaccttgagaagagtttatatttatccttggaaagggacatttttggcatgttctttatttacttgctttctcatgtcattaaatgtgtttttcataaggtctctctgttttaatgtattagtggagttgggcaattgaatctatataaaatgcaggtgagagattatgtaaaatctaaaataatccatgttatggataaaatggaaaatgatcttgaaggccacgagaacaacaacaacaacaaaatcctgaaaatctgatgtacttcagtcttcatattttaatagaaattgatggcatcctgcacagataaagttgatgttaaacttgacttttcaatgccttctctcaaccttagacagatactctttgtttggatttttaaagttattacagagttttccaatatagtatcctaatttaattaattctaattttttttttctgttttaggccttccaggtattagcacaacttataaaagaatctttatgaagaaattaaactaggttgggcatggtggctcacacctataatcccagcactttgggaggcagaggagggaggatcacttgaacccaggaattcaaggctgcagtaagctacgatcacaccactgcactctggcctgcatgcactctggcctgcatggcagaacaagaccctgtctctaaaaaaagagaaagaaatcaaactaatcatgctgctcatggatttttccaataaatttcttgttttggcaggaagaaatgaacactggtattagacttaaagattaaatttcctcaaacatgtcctatctgtagtagttcaactagacaccttttaaagtgcctctaaattcatcagatggccaaactgtatttataatccacttaggcattttgaaaaactttcaacctgtaaaaagttacttttatcttggatttattatgaagaactttgtagttgctttgtaatttcccataaattgtctttgaaactaacattttacactgaattattttgagattttaaagaagtaattaagtgcaaaatggtatataatgtgtactttttctacttttaggaaaatttaatgagagcttattgcaaaaattgttataatttggtcattataagtgacttttagtaaaagtaccataaaccttatgttatgccacagaaattcctttaaaataaaattcttaaactaaacatacctaaaggcatcagacccattaattctaagtaaggaggggagatcatggacttaggaaaatttactacattgtattttcataatactacataatttacaaaaatacattcttatcaattatgtaatttaaatctactacaaccctttaaggtattaggaaatattttttaactatttttttctcaccttttaaaatctttattaaagtaagatatgctcattttagaattttcaaacaatccagaatgtataaggaataaagtaaaagccactcactgtctcacccctggtgataactgctataagcatttagcatgcttcctttgcaatgttctctgcatacacatgtaatatctagaataggatctcattgtgacagtgtatcataaataccctgtattcattttctattcattttctgtttaacaaattgacgaagtgtcctatgacccaataattgtaaagttgtaagtatctttgcggaattaggaagtttatgtcattatcatttatgccatcccttgtgtatataaacatctccatcacagttattattttcctgcacgtctggatgagatgttacatctttcaacagctaaaattctcaagcagaaatctcaacctcaaagatcaaagcagctgaccccaagcccaaatccctatttctaaggcaaccagtggtaattatgtaggactgattgaagagacgcagggcctggaggaggaccaagatgaggaacctgacaattctcttcactgtgggaacagaaaattataaattagagagacttataaaagtaaaataagccttccccatactttattcagtacttttcaacaataaccaaaattgcttagtccagcattgcacggatgagtgccttgctttggttttgtttgtttgtttttaagtcaccatcatagaatagttgatttgtaaatcgacttagagttgcagctttcaagcaagggattattcctcaccacaatcttaacaaatctgttttcttcaaagaaaacagcaagaaaaagagtgagcacacacagtgccttatgacttagtgtttgtttttgtctgctgagattatctttccctcattaggaaactataaagtgttggaaaaatggagcgttattcattgctattgccattgtgaatttctccagccttctggaaaagcagtttggcagtgtctaccaagaaacgttaaaatattcatacccttgaatgcaatgtgttagatactgtggattagctcactcagcataaattctaatttcctgcttgtatctttgagcactgtaaatgcaaaatgctccatttgcagatgcccctgcagttacagtgtcagatatggctgtcattcagatgcctggattcaggggtgagttaagagggcagcaaggtaagatgtaaggcacgcgttttgctgacatggatcctagctaaggcagtatgatttttatagcaaatagcttattagtttggtggctttctaattctggcagaagcggtgaaatgctggtgctagaaatggttcctggaagctccatttacttttttagcaattccaacatctttggaaaccacagaatacgtgctagtaaataattttcaacaattttggaaatcatagaatacatgacaataaacacttattgctttaatcagctagagtagttttcattatctgcaactgatgccaatcagtatagccaggggtgtcaagggtctccaagcttgacgatttactaaatggactcacctgtgattgtgcatggagcgaaatctggaggaaacttccaggcacaagtttccaagtctcctgtctcagtagagtctctgtgaggtcccaaaggatgtacttaattcctccggcaaggatgtgtgataacacatgcaaccacgcctcacctcacctgagactggtggcccagagtttttcttaatggccatcacatacgcatacagtgcctgcatggctgacctcagttactgaagctgcagccagagagggaacgcaggtcttcactgtaaatcacattgttaggataaactaaatggaaaaactaaatgaagtacagtatagctgaagacctcccagcaggcaaaatgctcttatcagtcagaatgtttcaagggctcagttccaaggagccagccaagggccagtcatgaaaacccccattcattggtaatgtgtgtggtttaagtggccgagatccgctcagttaaccctttcctccctgccaaggatcccacttttagacatttgtagtaaagaattatgcaaactatggaagatgctttaaaaatgtgaagatagtaattgcagtttaaaatagcagaaagctggggacaggggcagaggtgttgtgactaaaggtctcacaataggaaaatgttgtcaattatggttcatccacttaactgaatttgaggcaaccactaaaacaccattatgaagcagtattactcattttatgatgaggcggtaaggtaaaaatgagtataataggaatgaaaacccagggtataagaagcatagccatagttggccaggcgcagtggctcacgcctataatcccagcactttgggaggccgaggcgggcggattacctgaggtcaggagttcgagatcagcctcagcaacatggtgaaaccccgtctctactaaatacaaaattagccgggcgtggtgacacatgcctgtaatcccagctacttgggaggctgaggcaggagaatcgcttgaacctgggaggcagaggatgcagcgagccgagatcatgccattgcactccagcctgggcaacaagagtaaatctccgtctcacctaaaaaaaaagaaacaaaaaagaagcatagccatagtttaattacaactatgtgaacacagaaaacattaccaaaatggtaacagttgggtaatttttttccttattttcaaaatattctatagcatggctcttttatcatttacaaatacatttaacaccttaactggtgacatgatccctttttcagttggacaaacagagattcctaaaggcgatggtaaaaatatataaatatcggtggcaaaggggctactaccaagcaataggaatcacattgaaagtcacatccgtgcagtcaccgtcagtgtgggcctgaacaaaaattacatgggtttcctaccgtggtctgcttagcttctgtgtggaagccatggtctccctggtcatggtctacaatgacttcaagcagctggagtagctggtcctggtggtattcaacatggcaatttcaaggtggccgataatggagcagttgtcacttggcatagttttcttttaatttaaatttgactatttgtccactctaggaatttcctcccctgcacataagatgctttccctgtaattcgtgtagagcacagtatatcttcaaatttcttttctaacacaactaattaaatagtgggtaggaaatattaactttatcaaaagtaggtttaattattttagagaatctaaagtcttaatgaaagtgaaatatcaaccggtcatataattttcactagtgatgtgtgtttattaacattttaagttctctgaagtccagaaccatactctttctctaggacccagtggtaactaggaatatctcattttaaaaaggaatgtattggttagcatgcctttacagttaaccctagttccaagcttcaggatttaaattttcacatatatgtgcgtgtgtgtgtgtgtgtgtgtgtgtatatatatatatatatatatatattttttttttttttttttgagacagactcactctgttacccaggctggagtgcaatggcatgatctcaactcactgcaacctccacctctcaggttgaagtgattctcctgcctcagcctcccaagtagctggaattacaggtgcccaccaccatgcccagctaatttgtgtatttttaggagagatgggggtttcaccatgttggtcaggctggtcttgaactcctgacctcaagtgatccacccgcctctgcttcccaaagtgctgggatacaggcgtgagccaccgtgcctagcctttacttacatattttactcattcattcagcaaatatttattaagtgcctattactctagactcagcatataccagtgaacaaattaaagaaattctttaccttcatggagcttatatttggggtaagggattggtgagggatgacagtaaaacgtattaaagtacatcatatgtgaagtgccacagaaaaaaataatacaaggtaaagggatagagcatgaaagggcgggggtgctgtttttgttttttgtttgttttgagatggagtctcgctctgtcgccaggctggaatgcagtggtgtgatctcggctcactgcaatctccacctcccaggttcaagtgatcctcgtgcctcagcctccctagtagctcggattacgggcgcccgccaccatgtccagctaatttttatatttagtagagacagggtttcaccatgttggccaggatggtctcgatctcttgacttcgtgatccaccctcctcggcctcccaaagtactgggattacaggtgtgagccaccacgcccagcctgggtgctgtttttaatagagggcccagagaagacccctagaacaagcggcatttgagcagagaggagtaagggagtgggccatgcaaatacttgtgcaaagataccaggcagcctgaacttgcaatgcagaagccctgaggaggaactacatctggcctgtttgaggaaccataacagtccagaatgctaaagagcaaacagaggtgtaatagtccactagggttgctgtaacaaagtaccacaaactgagtggcttcacagaaatttcttgtctcaccgttctggaatcttgaagtctaggatcaaggtgcctgcagggccatgctccctctgaaggcgtagggaaggatccgttccaggccatctcctaggcttggtatttccttggcttgtggcagcatcactccagtcttcatgaggcattctccctgagtgtgtgtctgtgtccaaatgtccccttttcacaagcataccaatcataatggattaggggacccatcctactccagtatgacctcatcttaactaactacatctgcaacaaccttatttccaaataaggtcacattctgaggtattgggggttaggacctcaaaacatgaatttggaaggtagggagacacaattcagctcacaacaacaggaaagtggtaaaagaagaaaagtcagagataggagtgagatggtggccagactaggaaaggctttacaggccatgtgagtgtccaaattgttctaatggaaattggaagccattggagggttttaaacagcagaacaggtaagtcacggtggtttacacctgtgatcccagcactttgagaggccaaggtgggcagatcacaaggtcaggagttcaagaccagcctggccaacacagtgaaatgccatctctactaaaagtacaaaaaaaattagccaggcatggtggtacacgcctgtagtcccagctacttgggaggctgaggcaggagaatcacttgaacccaggaggctgaggttgcagtgagcagacatcaagccactgcctgaatgacatctctaaataaataaacaaacagaacagcatgggctgacttgggtttcaaaagagcactctgactccagcatagagaatggatcggaaagaacaaaggtagaagctggaagaccatgtaggattctggagacagacgctctattttaattagtgtgatgggagagaactctgatgtcttggcatttaaggcaagacctaactaaagtgaagggcaattcacaaagatgtctgaggagagaagcaaaactattttttcaagaaaaactgaatataaaaaggccactcaatgaatttaaggtaaaataagtattatatgccttctcctctcatataatttgaat
